(19) United States
(12) Patent Application Publication
(10) Pub. No.: US 2011/0136123 A1
(43) Pub. Date: Jun. 9, 2011

(54) ALTERNATIVE SPLICING GENE VARIANTS IN CANCER

(75) Inventors: Roscoe Klinck, Sherbrooke (CA); Sherif Abou Elela, Stoke (CA); Benoit Chabot, Sherbrooke (CA)

(73) Assignee: UNIVERSITE DE SHERBROOKE, Sherbrooke, QC (CA)

(21) Appl. No.: 12/673,265

(22) PCT Filed: Aug. 15, 2008
(86) PCT No.: PCT/CA08/01477

§ 371 Date: Feb. 12, 2010

Related U.S. Application Data
(60) Provisional application No. 60/935,489, filed on Aug. 15, 2007.
(60) Provisional application No. 60/988,213, filed on Nov. 15, 2007.

(51) Int. Cl. C12Q 1/68

(52) U.S. Cl. 435/6.12; 435/6.14

(57) ABSTRACT

The present invention relates to a method to identify alternatively spliced variants enriched in cancer specimens and a method for prognosis of cancer in a subject by detecting a signature of splicing events. There is also provided a method for profiling cancer in a subject by detecting a signature of splicing events.

### TECHNICAL FIELD

[0001] The present invention relates to a method to identify alternatively spliced variants enriched in cancer specimens.

### BACKGROUND OF THE INVENTION

[0002] The transformation of a normal cell into a malignant cell results, among other things, in the uncontrolled proliferation of the progeny cells, which exhibit immature, undifferentiated morphology, exaggerated survival and proangiogenic properties and expression, overexpression or constitutive activation of oncogenes not normally expressed in this form by normal, mature cells.

[0003] Nearly all cancers are caused by abnormalities in the genetic material of the transformed cells. These abnormalities may be due to the effects of carcinogens, such as tobacco smoke, radiation, chemicals, or infectious agents. Other cancer-promoting genetic abnormalities may be randomly acquired through errors in DNA replication, or are inherited, and thus present in all cells from birth. Complex interactions between carcinogens and the host genome may explain why only some develop cancer after exposure to a known carcinogen. New aspects of the genetics of cancer pathogenesis, such as DNA methylation, and microRNAs are increasingly being recognized as important.

[0004] One example of cancer is epithelial ovarian cancer which is the second most common gynecological cancer and the deadliest amongst gynecological pelvic malignancies. Early symptoms of ovarian cancer are often mild and unspecific, making this disease difficult to detect. In most cases, at the time of diagnosis, cancer cells have already disseminated throughout the peritoneal cavity. In fact, over 70% of patients are diagnosed with late stage disease and only a minority survive over 5 years post-diagnosis. Early detection offers a 90% 5-year survival rate. The inability to detect ovarian cancer at an early stage and its propensity for peritoneal metastasis are largely responsible for these low survival rates.

[0005] Currently, there are no reliable methods for detecting early stages of epithelial ovarian cancer. Blood level of CA125 tumour antigen is employed as a predictor of clinical recurrence of ovarian cancers, and to monitor response to anticancer therapy (Yang et al., 1994, Zhonghua Fu Chan Ke Za Zhi, 29: 147-149). The CA125 serum marker combined with transvaginal ultrasonography are the current clinical tests offered for screening for early stages of ovarian cancer in high risk populations (Nikolic et al., 2006, Bosn J Basic Med Sci 6: 3-6). However, neither of these modalities individually or combined have proven reliable (Nikolic et al., 2006, Bosn J Basic Med Sci 6: 3-6), and there is an urgent need to develop new screening tests to detect epithelial ovarian cancer at an early stage.

[0006] Epithelial ovarian tumours are heterogeneous and include many different histopathological subtypes: serous, endometrioid, mucinous, clear cell, undifferentiated or mixed. The serous type is the most frequent and the second most lethal. Recent studies have focused on differences in molecular profiling of gene expression patterns to uncover diagnostic and prognostic markers as well as new therapeutic targets in a variety of cancers. Although promising results have been reported in some cancers, the genes that are differentially expressed between normal and cancer cells seem to vary between individual microarray studies, reflecting either a variability in methods and in the choice of model systems or a heterogeneity in selected tissues (Kopper & Timar, 2005, Pathol Oncol Res, 11: 197-203).

[0007] Another example of cancer is breast cancer. Breast cancer is the fifth most common cause of cancer death (after lung cancer, stomach cancer, liver cancer and colon cancer). Among women worldwide, breast cancer is the most common cause of cancer death. There are numerous ways breast cancer is classified. Like most cancers, breast cancer can be divided into groups based on the tissue of origin, e.g. epithelial (carcinoma) versus stromal (sarcoma). The vast majority of breast cancers arise from epithelial tissue, i.e. they are carcinomas.

[0008] Breast cancer is diagnosed by the examination of surgically removed breast tissue. A number of procedures can obtain tissue or cells prior to definitive treatment for histological or cytological examination. Such procedures include fine-needle aspiration, nipple aspirates, ductal lavage, core needle biopsy, and local surgical excision. These diagnostic steps, when coupled with radiographic imaging, are usually accurate in diagnosing a breast lesion as cancer. Occasionally, pre-surgical procedures such as fine needle aspirate may not yield enough tissue to make a diagnosis, or may miss the cancer entirely. Imaging tests are sometimes used to detect metastasis and include chest X-ray, bone scan, Cat scan, MRI, and PET scanning. While imaging studies are useful in determining the presence of metastatic disease, they are not in and of themselves diagnostic of cancer. Only microscopic evaluation of a biopsy specimen can yield a cancer diagnosis. Ca 15.3 (carbohydrate antigen 15.3, epithelial mucin) is a tumor marker determined in blood which can be used to follow disease activity over time after definitive treatment. Blood tumor marker testing is not routinely performed for the screening of breast cancer, and has poor performance characteristics for this purpose.

[0009] Thus, detection of many cancers still relies on detection of an abnormal mass in the organ of interest. In many cases, a tumor is often detected only after a malignancy is advanced and may have metastasized to other organs. For example, breast cancer is typically detected by obtaining a biopsy from a lump detected by a mammogram or by physical examination of the breast. Also, although measurement of prostate-specific antigen (PSA) has significantly improved the detection of prostate cancer, confirmation of prostate cancer typically requires detection of an abnormal morphology or texture of the prostate. Thus, there is a need for methods for earlier detection of cancer. Such new methods could, for example, replace or complement the existing ones, reducing the margins of uncertainty and expanding the basis for medical decision making.

[0010] It would be highly desirable to be provided with novel biomarkers for the early detection, prognosis and clinical management of cancers. Sensitive and specific tests that can diagnose different stages of cancer would greatly improve patient survival rates by facilitating early diagnosis and tailored therapies. It would also be highly desirable to be provided with new screening tests to detect cancer at an early stage.

### SUMMARY OF THE INVENTION

[0011] The present invention relates to a method to identify alternatively spliced variants enriched in cancer specimens.

[0012] In another embodiment, the cancer that can be detected in these cancer specimens is selected from the group consisting of breast cancer, glioma, large intestinal cancer, lung cancer, small cell lung cancer, stomach cancer, liver cancer, blood cancer, bone cancer, pancreatic cancer, skin cancer, head or neck cancer, cutaneous or intraocular melanoma, uterine sarcoma, ovarian cancer, rectal or colorectal cancer, anal cancer, colon cancer, fallopian tube carcinoma, endometrial carcinoma, cervical cancer, vulval cancer, squamous cell carcinoma, vaginal carcinoma, Hodgkin's disease, non-Hodgkin's lymphoma, esophageal cancer, small intestine cancer, endocrine cancer, thyroid cancer, parathyroid cancer, adrenal cancer, soft tissue tumor, urethral cancer, penile cancer, prostate cancer, chronic or acute leukemia, lymphocytic lymphoma, bladder cancer, kidney cancer, ureter cancer, renal cell carcinoma, renal pelvic carcinoma, CNS tumor, glioma, astrocytoma, glioblastoma multiforme, primary CNS lymphoma, bone marrow tumor, brain stem nerve gliomas, pituitary adenoma, uveal melanoma, testicular cancer, oral cancer, pharyngeal cancer, pediatric neoplasms, leukemia, neuroblastoma, retinoblastoma, glioma, rhabdomyoblastoma and sarcoma.

[0013] In one aspect, a method for prognosis of cancer in a subject by detecting a signature of splicing events comprising the steps of obtaining a nucleic acid sample from said subject, and determining whether the nucleic acid sample contains a signature specific to a cancer is disclosed.

[0014] There is also provided a method for profiling cancer in a subject by detecting a signature of splicing events comprising the steps of obtaining a nucleic acid sample from said subject, and determining whether the nucleic acid sample contains a signature specific to a cancer.

[0015] In a preferred embodiment, the signature comprises at least 1 splicing variant.

[0016] Further, the method disclosed herein also can comprise an initial step of designing at least two independent PCR primer pairs for each predicted exon-exon junction from a transcript map of a gene affected in a cancer.

[0017] In addition, the method disclosed herein can comprise a step of PCR amplifying the nucleic acid sample with the PCR primer pairs to obtain amplicons.

[0018] Further, the method disclosed herein can comprise the step of measuring the size and sequence of said amplicons.

[0019] Also in accordance with the present invention, there is disclosed a method for identifying a signature specific of a cancer, said signature consisting of at least one specific splicing event or a specific combination of splicing events, said method comprising the steps of designing at least two independent PCR primer pairs for each predicted exon-exon junction from a transcript map of a gene affected in cancer; reverse transcribing a template from RNA from a sample of cancer tissue and a sample from normal tissue; amplifying amplicons of said gene by PCR with the PCR primers pairs using the template reverse transcribed from the cancer tissue and the normal tissue; and determining the size and sequence of said amplicons; wherein the presence of said at least one alternative splicing event corresponds to the signature of the cancer.

[0020] Further, the method disclosed herein can comprise the step of performing a comparative analysis of amplicons obtained from the template reverse transcribed from the cancer tissue and the normal tissue.

[0021] Furthermore, the method disclosed herein can comprise the step of identifying the presence of at least one alternative splicing event in the gene.

[0022] In a preferred embodiment, the PCR primer pairs are designed to amplify amplicons ranging from 100 to 700 base pairs.

[0023] In another embodiment, the step of amplifying is carried out in a liquid handling system linked to a thermocycler.

[0024] Furthermore, the method disclosed herein can comprise the step of selecting amplicons with a difference of at least 10% of points between a mean Ψs for normal and cancer tissue and with a maximum standard deviation of the Ψs for each tissue type of at most 26%.

[0025] In accordance with the present invention, there is also provided a diagnostic kit for detecting a signature of ovarian cancer in a patient comprising PCR primer pairs for predicted exon-exon junctions of at least one splicing variant; and a set of instructions for using said primers to generate and detect a signature specific of a cancer, said signature consisting of at least one splicing variant or a specific combination of splicing variants.

[0026] In addition, the kit disclosed herein can also comprise a transcript map.

[0027] In another embodiment, the splicing variants occur in genes selected from the group consisting of AFF3, AGR3, APP, AXIN1, BMP4, BTC, C11orf17, CADM1, CCNE1, CHEK2, DNMT3B, FANCA, FANCL, FGFR1, FGFR2, FGFR4, FN1-EDA, FIN-EDB, FIN-IIICS, GATA3, GNB3, GPR137, HMGA1, HSC, IGSF4, KITLG, LGALS9, MCL1, NRG1, NUP98, PAXIP1, PLD1, POLI, POLM, PSAP, PTK2, PTPN13, RAD52, SHMT1, SLIT2, SRP19, STIM1, SYK, SYNE2 TOPBP1, TSSC4, TUBA4A and UTRN.

[0028] In another embodiment, the splicing variants occur in genes selected from the group consisting of ADAM15, BCAS1, C11ORF4, CCL4, CTNNA1, DDR1, DRF1, DSC3, ECGF1, ECT2, FN1, F3, H63, HMGA1, HMMR, INSR, LIG3, LIG4, NOTCH3, PACE4, POLB, PTPRB, RSN, RUNX2, SHC1, TLK1 and TNFRSF5.

[0029] In a preferred embodiment, the splicing events are selected from the group consisting of an alternative 3′ splicing, an alternative 5′ splicing, an alternative 3′ and 5′ splicing, a cassette exon and alternative 5′ or 3′ splicing, a multiple cassette exon splicing, a mutually exclusive exon splicing and a cassette exon splicing. Further, said splicing events are alternative cassette exon events.

[0030] In another embodiment, the splicing variant is:

(SEQ ID NO: 3061)
ggttcaccca ccagagtgat ntgtggagtt atggtgtgac tgtgtgggag ctgatgactt
ttggggccaa accttacgat gggatcccag cccgggagat ccctgacctg ctggaaaagg
gggagnnnnt gccccagccc cccatatgca ccattgatgt ctacatgatc atggtcaaat
gtgcgtggct gagctgtgct ggctgcctgg aggagggtgg gaggtcct.

### BRIEF DESCRIPTION OF THE DRAWINGS

[0031] Having thus generally described the nature of the invention, reference will now be made to the accompanying drawings, showing by way of illustration, preferred embodiments thereof, and in which:

[0032] FIG. 1 illustrates a layered and integrated system for splicing isoform annotation (LISA), wherein in (A) it is shown an overview of the LISA annotation process; in (B) a transcript map generated for the stromal interaction molecule 1 (STIM1) is shown as an example, wherein each variant transcript from AceView is shown on a separate line and named (left) as per the AceView convention, exons are shown as pale boxes, the intervening introns are shown as lines (not to scale), the relative locations of forward (green) and reverse (red) primers are shown as vertical lines, the designed PCR reactions are shown below each targeted transcript (black horizontal lines), and other relevant information, such as coding regions (dashed horizontal lines) or protein functional domains (magenta horizontal lines) are mapped onto this representation and can be accessed for subsequent data analysis; in (C) capillary electropherograms of the PCR reaction spanning AS event 1 of the STIM1 gene shown in (B) in a normal ovary and an epithelial ovarian cancer (EOC) pool wherein each reaction is compared to internal markers at 15 (M₁₅) and 7000 (M₇₀₀₀) base pairs and wherein amplicon sizes and concentrations relative to the markers are measured and digitized, and wherein the fluorescence signals in arbitrary units (au) of the short and long isoforms are indicated; in (D) graphical representation of the results obtained from the PCR reactions targeting the STIM1 AS event 1 in 4 RNA sources wherein each row represents data from a single RNA source, and each column represents a single PCR reaction spanning an AS event and wherein electropherograms were analyzed for the presence of expected amplicon sizes and the most intense amplicon signal for each reaction in all sources was identified and wherein the ratio of this amplicon relative to the total expected amplicon concentration was calculated and expressed as the percentage splicing index, Ψ;

[0033] FIG. 2 illustrates an example of splicing annotations generated by LISA, such as in (A) it is shown a LISA generated displays of the cancer-associated gene SHMT1 wherein exon sizes (black rectangles) are proportional to the square root of their lengths, introns (white rectangles) are not to scale, all putative exon-exon junctions are automatically assigned (uppercase letters in the intervening introns), and wherein the alternative splicing (AS) events are identified, classified by type and listed beneath the transcript representation (labeled by roman numerals); in (B) a LISA-generated summary of RNA source specific detection of SHMT1 exon-exon junctions is shown, wherein the exon-exon junction analysis was performed for each of 2 ovarian cancer tissue pools and 2 normal tissue pools, whereas columns represent the data for each exon-exon junction defined in (A), and each row represents a different RNA source, junctions are classified as detected (green), not detected (red) or, when data is ambiguous, not determined (white), and data from all RNA sources were subjected to unsupervised clustering and displayed with a dendrogram (left) representing the similarities between the RNA sources used; in (C) RNA source-based display of AS events is exemplified, wherein the data generated in (B) was further analyzed to assess the state of each detected AS event, AS events defined in (A), (columns), are classified as yielding a long form, a short form or both for each RNA source (rows), such as the presence (green) or absence (red) of the long form is indicated in the left semicircle for each event in each RNA source, likewise for the short form's state is indicated in the right semicircle, and wherein the data from each RNA source is clustered and presented with its corresponding dendrogram (left) to emphasize RNA source similarities;

[0034] FIG. 3 illustrates four-phase pipeline for the identification of serous ovarian cancer associated alternative splicing (AS) events, wherein the discovery screen was conducted using 2 pools of RNA extracted from 4 different normal tissues and 2 pools of RNA extracted from 4 different epithelial ovarian cancer (EOC) tissues, a total of 600 ovarian associated genes were analyzed using a comprehensive set of PCR primers that span all possible splicing events, and the AS events showing different profiles in normal and tumour tissue pools were selected for the validation screen, and for this screen, 104 putative cancer-associated AS events, derived from 98 genes were analyzed in 25 normal and 21 tumour samples;

[0035] FIG. 4 illustrates a distribution of the different types of alternative splicing (AS) events in ovarian cancer associated genes, wherein in (A) the distribution of the predicted and LISA validated AS events in 182 ovarian cancer-specific genes is shown, wherein AS events are categorized into seven types: alternative 3′ or 5′ or both (Alt. 3′, Alt. 5′, Alt. 3′ & 5′), single or multiple cassette exon (Cass., Mult. cass.), cassette exon and alternative 3′ or 5′ (Cass. & alt 3′ or 5′), and mutually exclusive exons (Mut. Excl.), and wherein bar height represents total number of AceView predicted AS events of each type, and these events were either validated (black) in at least one pool sample, or not validated (grey) in any of the four ovarian tissue pools; in (B) a comparison of the distribution of the detected AS events following the discovery screen, and cancer-associated AS events identified following the validation screen is shown;

[0036] FIG. 5 illustrates novel splicing event in ERBB2 mRNA identified by the LISA, wherein two AceView rendered transcripts of ERBB2 are shown schematically (top), exon sizes (black rectangles) are proportional to the square root of their lengths, introns (white rectangles) are not to scale, and further wherein in the detailed representation of the region of interest (bottom), the exons are shown as blue rectangles with numbers indicating their sizes in nucleotides (nt), relative positions of forward (green) and reverse (red) primers are shown, and marker peaks at 15 bp (M15) and 7000 bp (M7000) are also shown;

[0037] FIG. 6 illustrates a summary of the serous ovarian cancer associated alternative splicing (AS) events, wherein the clustering of ovarian cancer associated AS variation of 45 genes (columns) analyzed in 50 ovarian tissue samples (rows) is shown, the splicing variations are presented in scaled percent splicing index (ψ) values shown in a gradation of colors representing the number of standard deviations from the mean value (Z score), the tissue hierarchical clustering is shown as a dendrogram (left), the column on left shows clustered positions of normal (green) and serous tumour tissues (red), wherein the columns are ordered according to the difference of the mean ψ values of normal and tumour samples. ψ values are high (tendency towards blue color) in normal tissue for the 24 genes on the left, and high in tumour tissue for the remaining 21 genes;

[0038] FIG. 7 illustrates a quantitative PCR for a subset of 11 validated genes in 2 ovarian normal and 2 serous tumour pools, wherein Relative quantitation (RQ), calculated using the ΔΔCt method, relative to Normal Pool 1 which was normalized to a value of 1 is shown.

### DETAILED DESCRIPTION OF THE PREFERRED EMBODIMENT

[0039] In accordance with the present invention, there is provided a method to identify alternatively spliced variants enriched in cancer specimens.

[0040] The term “cancer” includes but is not limited to, breast cancer, large intestinal cancer, lung cancer, small cell lung cancer, stomach cancer, liver cancer, blood cancer, bone cancer, pancreatic cancer, skin cancer, head or neck cancer, cutaneous or intraocular melanoma, uterine sarcoma, ovarian cancer, rectal or colorectal cancer, anal cancer, colon cancer (generally considered the same entity as colorectal and large intestinal cancer), fallopian tube carcinoma, endometrial carcinoma, cervical cancer, vulval cancer, squamous cell carcinoma, vaginal carcinoma, Hodgkin's disease, non-Hodgkin's lymphoma, esophageal cancer, small intestine cancer, endocrine cancer, thyroid cancer, parathyroid cancer, adrenal cancer, soft tissue tumor, urethral cancer, penile cancer, prostate cancer, chronic or acute leukemia, lymphocytic lymphoma, bladder cancer, kidney cancer, ureter cancer, renal cell carcinoma, renal pelvic carcinoma, CNS tumor, glioma, astrocytoma, glioblastoma multiforme, primary CNS lymphoma, bone marrow tumor, brain stem nerve gliomas, pituitary adenoma, uveal melanoma (also known as intraocular melanoma), testicular cancer, oral cancer, pharyngeal cancer or a combination thereof. In an embodiment, the cancer is a brain tumor, e.g. glioma. In another embodiment, the cancer expresses the HER-2 or the HER-3 oncoprotein. The term “cancer” also includes pediatric cancers, including pediatric neoplasms, including leukemia, neuroblastoma, retinoblastoma, glioma, rhabdomyoblastoma, sarcoma and other malignancies.

[0041] Accordingly, there is provided a method of identifying new markers characteristic of a signature for a cancer.

[0042] Alternative splicing of pre-mRNA is a post-transcriptional process that allows the production of distinct mRNAs from a single gene with the potential to expand protein structure and diversity. Alternative splicing can also introduce or remove regulatory elements to affect mRNA translation, localization or stability. More than 70% of human genes may undergo alternative splicing with many genes capable of producing dozens and even hundreds of different isoforms.

[0043] In multicellular organisms, alternative splicing is a process that is tightly regulated during development and in different tissues. Inherited and acquired changes in pre-mRNA splicing patterns have been associated with several human diseases including cancer (Venables, 2006, Bioessays, 28: 378-386). Some of these changes can arise from mutations at either the splice sites or within proximal splicing enhancer or silencer elements (Pagani & Baralle, 2004, Nat Rev Genet, 5: 389-396). In other cases, variations in the expression of trans-acting splicing factors have been observed (Brinkman, 2004, Clin Biochem, 37: 584-594). A direct effect in splice site use resulting in the production of cancer-specific splice isoforms has been observed in a few cases (Karni et al., 2007, Struct Mol Biol, 14: 185-193). Cancer-specific alterations in splice site selection can affect genes controlling cellular proliferation (e.g., FGFR2, p53, MDM2, FHIT and BRCA1), cellular invasion (e.g., CD44, Ron), angiogenesis (e.g, VEGF), apoptosis (e.g, Fas, Bcl-x and caspase-2) and multidrug resistance (e.g., MRP-1).

[0044] Following initial computational efforts designed to exploit collections of expressed sequence tag (EST) databases, there has been an increase in high-throughput experimental approaches to identify changes in splicing events under a variety of conditions. Oligonucleotide-based microarray technologies have been introduced to identify global alternative splicing events and to examine changes in the alternative splicing of a large collection of events. These approaches are useful for monitoring the expression of known splice variants. However, they are not designed to discover novel splice sites, nor do they provide information on the combinatorial patterns of exon inclusion/skipping in the same gene. Furthermore, the lack of standardized analysis and normalization can compromise the interpretation of the results.

[0045] Arrays made from alternative splice junction probes have been used to detect splicing changes in Hodgkin Lymphoma (Relogio et al., 2005, J Biol Chem, 280: 4779-4784) and breast cancer cell lines and xenografts (Li et al., 2006, Cancer Res, 66: 1990-1999). A related medium-throughput technique has been used to show that alternative splicing analysis can complement the power of gene expression analysis of prostate tumours (Li et al., 2006, Cancer Res, 66: 4079-4088; Zhang et al., 2006, BMC Bioinformatics, 7: 202). So far, 30 different genes have been shown to be alternatively spliced in a cancer-specific manner (Venables, 2004, Cancer Res, 64: 7647-7654). In ovarian tumours specifically, three genes have been reported to be regulated at the level of splicing (He et al., 2007, Oncogene, advance online publication, Feb. 19, 2007; Sigalas et al., 1996, Nat Med 2: 912-917).

[0046] Thus, in the present invention, there is disclosed a layered and integrated system for splicing isoform annotation platform (LISA). LISA relies on automated RT-PCR technology that generates tissue-specific annotation of alternative splicing events. The bioinformatics infrastructure supporting the annotation effort helps assess the potential functional impact of individual alternative splicing events and allows adaptable visualization of large sets of validated results.

[0047] The LISA is used in a preferred embodiment to identify alternatively spliced variants enriched in cancer specimens. There is reported herein a set of highly significant and biologically relevant splicing differences that make up a strong signature for cancer samples.

[0048] The signature of a cancer sample consists in the presence of alternatively spliced variants in the sample, More specifically, the signature is composed of at least one gene, which discriminates between a cancerous tissue and normal tissue with about 90% accuracy. More preferably, the signature is composed of at least 2, 3, 4 or 5 variants, or markers, disclosed for example in Table 1 herein below, more preferably at least 6, 7, 8, 9, or 10, preferably 15, 20, 25, 30, 35, 40, 45, more preferably 48 variants. Thus, the combination of more than one alternative spliced variant can also be used as a signature.

[0049] In order to identify such alternatively spliced variants, there is disclosed a method using the layered and integrated system described herein. As a first step, a map of splicing events is generated. A list of genes potentially involved in cancer such as, for example in ovarian or breast cancer, is first obtained by screening databases. Then, the exon structure of each gene is determined. All splice sites are identified, generating the splicing map. The following step consists in designing PCR primers and designing PCR reactions to cover all putative exon-exon junctions identified on the splicing map. Following, the RNA isolated from samples from “normal tissues” (without cancer) and from samples positive for a specific cancer is reverse transcribed in bulk. The DNA obtained from the reverse transcription is then used as template for the PCR reactions conceived previously, also using the PCR primers designed previously. Once PCR amplicons are obtained, the amplicons from normal tissues are compared to those obtained from cancer tissues. Splicing events are thus identified following this comparison. The method described herein allows identification of splicing events which will be part of a cancer signature and will thus allow prognosing or profiling the presence of the target cancer in a patient by identifying the presence of this signature, i.e. the presence of one or more alternative splicing events occurring in cancer samples and not occurring in normal samples.

[0050] The LISA uses RT-PCR to provide a systematic and comprehensive coverage of alternative splicing events. As illustrated in FIG. 1A, LISA includes a computational automated framework for high throughput RT-PCR analysis of splicing isoforms. Within the system, a transcript map containing publicly available mRNAs and ESTs for each gene is generated and sets of PCR primers and experiments are designed such that all putative exon-exon junctions and alternative splicing events are covered by at least two distinct PCR reactions. The data are transferred to the LISA database and analyzed to identify amplicons. Transcript information for each selected gene is uploaded into the LISA database from AceView. The system automatically designs PCR primers and PCR reactions to cover all putative exon-exon junctions. RNA is reverse transcribed in bulk, using a mixture of random hexamers and poly (T) oligonucleotides. The experiment design is sent to an automated platform that performs the PCR reactions in 384 well plates and separates and quantifies the resulting amplicons by capillary electrophoresis. Digitized experimental data is merged with the transcript input for analysis. PCR reactions are carried out, for example, using a liquid handling system linked to thermocyclers, and the amplified products are analyzed by, for example and not restricted to, an automated chip-based capillary electrophoresis.

[0051] Contrary to current approaches that identify tissue-specific variations in alternative splicing profiles relying heavily on microarray analysis to produce large quantities of data that must further be validated by RT-PCR, a preferred embodiment is directed to a method that directly inspects hundreds of genes by RT-PCR without recourse to cumbersome slab gel methods. LISA effectively fills a gap between large-scale microarray studies and individual gene investigations, providing an alternative to array-based expression profiling.

[0052] As disclosed herein below, the LISA was used to provide high quality comprehensive annotation of alternative splicing for 600 genes in 46 different tissues. The analysis required nearly 100 000 RT-PCR reactions that were carried out in less than eight weeks.

[0053] One major advantage of LISA is the associated in silico filtering modules that can combine alternative splicing data with queries on sequence or coding information, such as Pfam domains, putative RNA secondary structure, and single nucleotide polymorphisms.

[0054] Furthermore, the encompassed method herein further comprises an initial step of verifying the tissue-specific representation of expression data in such databases. Depending on the result of this assessment, the coverage of each gene could be modified accordingly. Poorly represented tissues would benefit from a complete annotation strategy, as employed here, whereas for well represented tissues, the design module could be modified to focus only on EST supported alternative splicing events. This would allow gene analysis to be performed with limited number of PCR reactions, enabling the screening of many more genes or tissue specimens with the same total number of reactions.

[0055] In one example of a screen presented here, with only 600 genes, 48 splicing events not previously detected in ovarian cancers were identified.

[0056] The majority (>80%) of the identified cancer-specific alternative splicing events are exon cassettes that extended the coding portions of genes. (see Table 1). For example, the short DNMT3B isoform is lacking part of the catalytic DNA methyltransferase domain, including the TRD loop previously shown to be important for cytosine recognition, and is therefore inactive. Another example where alternative splicing affects function concerns the growth factor KITLG. In this case, the skipped exon encodes a metalloprotease cleavage site that determines whether KITLG will be membrane-bound or secreted. The transmembrane form is more active in promoting cell-cell adhesion, cell proliferation and survival by inducing more persistent tyrosine kinase activation than the secreted isoform. The overall preferential enrichment of in-frame alternative cassette exons within functional domains of ovarian cancer-associated genes suggests that alternative splicing of these genes contributes to ovarian tumour biology.

TABLE 1
Properties of ovarian cancer-specific alternative splicing (AS) variants.

| | | | | | Epithelial ovarian |
|---|---|---|---|---|---|
| | | | | | cancer specific |
| Gene | | ASE¹ size, | in frame/in | | (CS) or epithelial |
| symbol | Gene name | type in EOC² | coding region | Function | specific (ES) |
| AFF3 | AF4/FMR2 family, | +75 nt; exon | Coding region in | Transcription | ES |
| | member 3 | | frame | factor | |
| AGR3 | Anterior gradient | −136 nt; exon | Removes ATG | Breast cancer | n.d. |
| (BCMP11) | homolog 3 | | Downstream | | |
| | | | initiation | | |
| APP | Amyloid beta (A4) | −57 nt; exon | Coding region | Transmembrane/ | CS |
| | precursor protein | | in frame | secreted | |
| AXIN1 | Axin 1 | −108 nt; exon | Coding region in | G protein | ES |
| | | | frame | signalling | |
| BMP4 | Bone morphogenetic | +209 nt; alt 5′ | 5′UTR | Bone growth | CS |
| | protein 4 | | | factor | |
| BTC | Betacellulin | −147 nt; exon | Coding region in | EGF family of | CS |
| | | | frame | growth factors. | |
| C11orf17 | C11orf17 | +81 nt; exon | Coding region in | PKA- | ES |
| | | | frame | interacting | |
| | | | | protein | |
| CADM1 | Cell adhesion molecule 1 | +33 nt; exon | Coding region in | Adhesion | CS |
| (IGSF4) | | | frame | | |
| CCNE1 | Cyclin E1 | +135 nt; exon | Coding region in | S phase | ES |
| | | | frame | progression | |
| CHEK2 | Checkpoint kinase 2 | +62 nt; exon | Out of frame | cell cycle | ES |
| | | | truncating | checkpoint | |
| | | | | regulator | |
| DNMT3B | DNA (cytosine-5-)- | +189 nt; | Coding region in | De novo | CS |
| | methyltransferase 3 beta | (2 exons) | frame | methylation | |
| FANCA | Fanconi anemia, | −129 nt; exon | Coding region in | Genome | ES |
| | complementation group A | | frame | stability | |
| FANCL | Fanconi anemia, | +278 nt; (4 | Out of frame | Stem cell | ES |
| | complementation group L | exons) | truncating | maintenance | |
| | | | Or alternate | | |
| | | | ATG used | | |
| FGFR1 | Fibroblast growth factor | +267 nt; exon | Coding region in | Mitogenesis | CS |
| | receptor 1 | | frame | and | |
| | | | | differentiation | |
| FGFR2 | Fibroblast growth factor | +267 nt; exon | Coding region in | Mitogenesis | ES |
| | receptor 2 | | frame | and | |
| | | | | differentiation | |
| FGFR4 | Fibroblast growth factor | +194 nt; alt 3′ | Longer form is | Mitogenesis | ES |
| | receptor 4 | | truncated | and | |
| | | | | differentiation | |
| FN1-EDA | Fibronectin | −270 nt; exon | Coding region in | Cell adhesion | ES |
| | | | frame | and migration | |
| FN1-EDB | | −273 nt; exon | Coding region in | | ES |
| | | | frame | | |
| FN1-IIICS | | −93 nt; intron | Coding region in | | ES |
| intron | | | frame | | |
| FN1-IIICS | | −75 alt 3′ | Coding region in | | ES |
| upstream | | | frame | | |
| GATA3 | GATA binding protein 3 | +143 nt; exon | Out of frame | Transcription | ES |
| | | | | factor | |
| GNB3 | Guanine nucleotide | +241 nt; intron | Removes ATG | Hypertension | CS |
| | binding protein (G | | Downstream | | |
| | protein), beta | | initiation | | |
| | polypeptide 3 | | | | |
| GPR137 | G protein-coupled | −376 nt; (2 | Out of frame | Unknown | ES |
| (C11orf4) | receptor 137 | exons) | truncating | | |
| HMGA1 | High mobility group AT- | +33 nt; alt 5′ | Coding region in | Transcription | ES |
| | hook 1 | | frame | factor | |
| HSCB | HscB iron-sulfur cluster | −145 nt; exon | Coding region in | Protein folding | CS |
| (HSC20) | co-chaperone homolog | | frame | chaperone | |
| KITLG | KIT ligand | −84 nt; exon | Coding region in | Tyrosine- | CS |
| | | | frame | kinase | |
| | | | | receptor ligand | |
| | | | | Cell migration | |
| LGALS9 | Lectin, galactoside- | +96 nt; exon | Coding region in | Modulating | CS |
| | binding, soluble, 9 | | frame | cell-cell and | |
| | (galectin 9) | | | cell-matrix | |
| | | | | interactions | |
| MCL1 | Myeloid cell leukemia | +248 nt; exon | Out of frame | Apoptosis | ES |
| | sequence 1 (BCL2- | | | | |
| | related) | | | | |
| NRG1 | Neuregulin 1 | −24 nt; exon | Coding region in | Glycoprotein | CS |
| | | | frame | Ligand of | |
| | | | | ERBB family | |
| NUP98 | Nucleoporin 98 kDa | −222 nt; exon | Coding region in | Signal- | CS |
| | | | frame | mediated | |
| | | | | nuclear | |
| | | | | transport | |
| PAXIP1 | PAX interacting (with | −71 nt; alt 5′ | Out of frame | Genome | ES |
| | transcription-activation | | truncating | stability, | |
| | domain) protein 1 | | | condensation | |
| | | | | of chromatin | |
| | | | | and mitotic | |
| | | | | progression | |
| PLD1 | Phospholipase D1, | −114 nt; exon | Coding region in | Regulation of | ES |
| | phosphatidylcholine- | | frame | mitosis | |
| | specific | | | | |
| POLI | Polymerase (DNA | +106 nt; intron | Out of frame | DNA damage | CS |
| | directed) iota | | truncating | checkpoint | |
| POLM | Polymerase (DNA | +270 nt; (2 | Coding region in | DNA repair | ES |
| | directed), mu | exons) | frame | | |
| PSAP | Prosaposin | −9 nt; exon | Coding region in | Secreted | n.d. |
| | | | frame | glycoprotein | |
| | | | | precursor | |
| PTK2 | Protein tyrosine kinase 2 | +9 nt; exon | Coding region in | Focal | CS |
| | | | frame | adhesion | |
| | | | | tyrosine | |
| | | | | kinase | |
| PTPN13 | Protein tyrosine | +57 nt; exon | Coding region in | Signalling, | ES |
| | phosphatase, non- | | frame | apoptosis | |
| | receptor type 13 (APO- | | | | |
| | 1/CD95 (Fas)- | | | | |
| | associated | | | | |
| | phosphatase) | | | | |
| RAD52 | RAD52 homolog (S. cerevisiae) | +151 nt; exon | Inclusion causes | DNA double- | ES |
| | | | reading frame | strand break | |
| | | | truncation | repair and | |
| | | | | homologous | |
| | | | | recombination | |
| SHMT1 | Serine | +117 nt; exon | Coding region in | Purine | ES |
| | hydroxymethyltransferase 1 | | frame | synthesis | |
| SLIT2 | Slit homolog 2 | −12 nt; exon | Coding region in | Migration and | CS |
| | (Drosophila) | | frame | metastasis | |
| SRP19 | Signal recognition | +112 nt; exon | Out of frame | Protein | CS |
| | particle 19 kDa | | truncating | transport to | |
| | | | | ER | |
| STIM1 | Stromal interaction | −93 nt; exon | Coding region in | Transmembrane | ES |
| | molecule 1 | | frame | protein | |
| SYK | Spleen tyrosine kinase | −69 nt; exon | Coding region in | Lamellipodia | ES |
| | | | frame | formation | |
| SYNE2 | Synaptic nuclear | −69 nt; exon | Coding region in | Nuclear | CS |
| | envelope protein 2 | | frame | anchorage to | |
| | | | | cytoskeleton | |
| TOPBP1 | Topoisomerase (DNA) II | +15 nt; alt 3′ | Coding region in | Genomic | ES |
| | binding protein 1 | | frame | stability | |
| TSSC4 | Tumor suppressing | −192 nt; intron | Coding region in | Tumor | CS |
| | subtransferable | | frame | supressor | |
| | candidate 4 | | | | |
| TUBA4A | Tubulin, alpha 1a | +223 nt; exon | Out of frame | Cytoskeleton | ES |
| (TUBA1) | | | truncating | | |
| UTRN | Utrophin | −39 nt; exon | Coding region in | Dystrophin, | CS |
| | | | frame | neuromuscular | |
| | | | | junction | |

¹ASE: alternative splicing event;
²EOC: epithelial ovarian cancer.

[0057] The present invention will be more readily understood by referring to the following examples which are given to illustrate the invention rather than to limit its scope.

### Example 1

### Mapping Splicing Events by Comprehensive RT-PCR Coverage

[0058] The gene list was obtained by a keyword search for “ovarian cancer” in NCBI Gene database. The search was performed in January 2006, and was limited to human genes with “known” RefSeq status (Nucleic Acids Res 2005 Jan. 1; 33(1): D501-D504). The 233 genes generated from this search were cross referenced with the AceView database and 182 genes showing evidence of alternative splicing were selected for this study. The exon structure of each gene was determined using AceView as a source for cDNAs and multi-exon ESTs (Thierry-Mieg & Thierry-Mieg, 2006, Genome Biol, 7 Suppl 1, S12, 1-14). The LISA automatically identifies all splice sites and generates a splicing map, as shown for the neogenin homolog 1 (NEO1) gene in FIG. 1B. Concurrently, the LISA applies a modified PRIMER3-based (Rozen & Skaletsky, 2000, Methods Mol Biol, 132: 365-386) algorithm for the automated design of PCR primers. Each gene's AceView transcript set was mapped into the LISA database and the LISA design module was used to generate a PCR experiment set. This module is a perl script which reads input sequences from the database and automatically designs PCR primers to characterize the exon structure of the gene. The overall strategy allowed designing primers for all exons in the transcript set, such that PCR experiments flanking all possible exon-exon junctions could be designed. In practice, a forward and reverse primer was designed for all internal exons, and single primers were designed for terminal exons. Primers were designed using a Primer-3 based algorithm (Rozen & Skaletsky, 2000, Methods Mol Biol, 132: 365-386) and synthesized in 96-well plates on a 25 nmole scale (IDT, Coralville, Iowa). PCR reactions were formulated to cover all constitutive splicing events with a single reaction and alternative splicing events were covered by at least 2 independent reactions. In addition, the design was such that predicted amplicon sizes fell within the 100-700 base pair range, where possible, to facilitate the data analysis. An average of 37 primers and 54 reactions were designed per gene (see Table 2).

TABLE 2

List of primer pairs for each identified gene and listed
in the sequence listing.

| | | | | |
|---|---|---|---|---|
| | | SEQ | | SEQ |
| Gene | | ID | | ID |
| name | forward sequence | NO: | reverse sequence | NO: |

| | | | | |
|---|---|---|---|---|
| AFF3 | CATGGACAGCTTCGACTTAGC | 2 | TACAGATAGACGAGGGCTGGTT | 1 |
| AFF3 | CATGGACAGCTTCGACTTAGC | 2 | GTGCCATCATCCTGTTGAGTT | 3 |
| AFF3 | ACTTAGCCCTGCTCCAGGAAT | 4 | AGAATTAAACGTGCCATCATCC | 5 |
| AFF3 | CAGGAATGGGACCTCGAGTC | 6 | GGCTCACTGAAGAGAGAGTAACTAGAA | 7 |
| AFF3 | AGCTTCGACTTAGCCCTGCT | 8 | CCATCATCCTGTTGAGTTTCTTGA | 9 |
| AFF3 | ATGGGACCTCGAGTCACTGT | 10 | CTTGTAGGGCTCACTGAAGAGAG | 3062 |
| AFF3 | TCCCACCATGGACAGCTTCG | 11 | TTAAACGTGCCATCATCCTGTTGA | 3063 |
| AFF3 | CTGCTCCAGGAATGGGACCT | 12 | GAGTAACTAGAATTAAACGTGCCATCA | 3064 |
| AFF3 | GCGGCGACGCTGACACCT | 13 | CTTTCTCGTTCTTTCCTCCGTAATGC | 3065 |
| AFF3 | CTGATCACCTGCCTTTCCAG | 14 | TGCATTTCTATCTGGTTCATAGACA | 3066 |
| AFF3 | GTTTGAAGTCGACACCCAGAG | 15 | CCTCCGTAATGCATTTCTATCTG | 16 |
| AFF3 | CCAGTTTGTCCCCCTTCC | 17 | TTCTTTCCTCCGTAATGCATTTCT | 18 |
| AFF3 | GCCTTTCCAGACCGGAGAC | 19 | GAGAGTTCATCCCCCTTGTTAG | 20 |
| AFF3 | AGAGGCCAGTTTGTCCCCCT | 21 | TCCGGTTGGAGAGTTCATCC | 22 |
| AFF3 | AGTCGACACCCAGAGGCCAG | 23 | CATCATAATTGCCTAAAGTGTTCTGG | 24 |
| AFF3 | AGACGGGCGGCAAGTTTGAA | 25 | GCCTAAAGTGTTCTGGATCCGG | 26 |
| AFF3 | CGGCAAGTTTGAAGTCGACACCC | 27 | AAAGTGTTCTGGATCCGGTTGGAG | 28 |
| AFF3 | CACCTGCCTTTCCAGACCGG | 29 | TCTGGATCCGGTTGGAGAGTTCA | 30 |
| APC | TCCTACAGCTACAGAGATTCAAGATG | 31 | TCTCTCAGTCGAGCAAGTTCC | 32 |
| APC | TGTTCAGCAGTTGGACTTAACG | 33 | TTGTGGCTTGGTTTCTCTGG | 34 |
| APC | CAAGATGTATGTTCAGCAGTTGG | 35 | CGACGTTTCTTTCGTTTCTCC | 36 |
| APC | GCAGTTGGACTTAACGTATTTCTTG | 37 | AAGTTCCTGCCGACGTTTCT | 38 |
| APC | GCTGTTGAAAATCCTACAGCTACAG | 39 | CTTCTTGGGAAACGTCATCTTC | 40 |
| APC | AAGACCATCGCAGAGGGAAG | 41 | GTCATCTTCTCAAGTGCAGCC | 42 |
| APC | AGGCGAATCCCCATAAGTAAG | 43 | TCTCAAGTGCAGCCATCTTG | 44 |
| APC | AATAAGAAGACCATCGCAGAGG | 45 | TTCGTTTCTCCTTCTTCAGGG | 46 |
| APC | CAGAGGGAAGGCGAATCC | 47 | CTGGAAATGTCATCTTCTTGGG | 48 |
| APC | TTTAAATAATAAGAAGACCATCGCAG | 49 | CCTGACCCCTCAGACATTCTTA | 50 |
| APC | AGGGAAGGCGAATCCCCATA | 51 | TGAGAGTCCTGAGTCTCTCAGTCG | 52 |
| APC | CATCGCAGAGGGAAGGCGAA | 53 | TCCTGCCGACGTTTCTTTCGTT | 54 |
| APC | AGAGGGAAGGCGAATCCCCATAAGTAA | 55 | TCGAGCAAGTTCCTGCCGAC | 56 |
| APP | GCAACCGGAACAACTTTGAC | 57 | GGGCATGTTCATTCTCATCC | 58 |
| APP | ATGTGACTGAAGGGAAGTGTGC | 59 | CGAGATACTTGTCAACGGCA | 60 |
| APP | TGACACAGAAGAGTACTGCATGG | 61 | TTCTGGAAATGGGCATGTTC | 62 |
| APP | GTGTGCCCCATTCTTTTACG | 63 | GCCTCTCTTTGGCTTTCTGG | 64 |
| APP | ACTTTGATGTGACTGAAGGGAAG | 65 | ATTCTCTCTCGGTGCTTGGC | 66 |
| APP | CGGAACAACTTTGACACAGAAG | 67 | TTGGCCTCAAGCCTCTCTTT | 68 |
| APP | TTCTTTTACGGCGGATGTGG | 69 | TTTGGCTTTCTGGAAATGGG | 70 |
| APP | AAGGGAAGTGTGCCCCATTC | 71 | ATACTTGTCAACGGCATCAGGG | 72 |
| APP | ACAACTTTGACACAGAAGAGTACTGC | 73 | GGAAATGGGCATGTTCATTCTC | 74 |
| APP | AGTACTGCATGGCCGTGTGT | 75 | CCTCAAGCCTCTTTGGCTTT | 76 |
| APP | CCCCATTCTTTTACGGCGGA | 77 | TCTCGGTGCTTGGCCTCAAG | 78 |
| APP | ATGTGGCGGCAACCGGAAC | 79 | GCATGTTCATTCTCATCCCCAGGT | 80 |
| APP | GAAGGGAAGTGTGCCCCATTCTTTTAC | 81 | TCTCGAGATACTTGTCAACGGCATCAG | 82 |
| APP | ATGGCCGTGTGTGGCAGC | 83 | CTGGGACATTCTCTCTCGGTG | 84 |
| APP | AGGTGTGCTCTGAACAAGCC | 85 | GGTACTGGCTGCTGTTGTAGG | 86 |
| APP | CGCTGGTACTTTGATGTGACTG | 87 | ATCCCCAGGTGTCTCGAGAT | 88 |
| APP | TGCCGAGCAATGATCTCC | 89 | GCATCAGGGGTACTGGCTG | 90 |
| APP | CTCTGAACAAGCCGAGACG | 91 | TTCTCATCCCCAGGTGTCTC | 92 |
| APP | AATGATCTCCCGCTGGTACTT | 93 | TCAACGGCATCAGGGGTACT | 94 |
| APP | CGAGCAATGATCTCCCGCTG | 95 | ATCAGGGGTACTGGCTGCTGTTG | 96 |
| APP | GGCCGTGCCGAGCAATGAT | 97 | ATTCTCATCCCCAGGTGTCTCGAGATA | 98 |
| APP | ATCTCCCGCTGGTACTTTGATGT | 99 | TCTGCCTCTTCCCATTCTCTC | 100 |
| APP | ACAAGCCGAGACGGGGCC | 101 | TGGCTGCTTCCTGTTCCAAA | 102 |
| APP | TGTGGAAGAGGTGGTTCGAG | 103 | GTTCTTTGCTTGACGTTCTGC | 104 |
| APP | AGAGTCTGTGGAAGAGGTGGTTC | 105 | GGCAAGTTCTTTGCTTGACG | 106 |
| APP | CAGAGAGAACCACCAGCATTG | 107 | CAGGTTTAGGCAAGTTCTTTGC | 108 |
| APP | CACCAGCATTGCCACCAC | 109 | TGCCTTCTTATCAGCTTTAGGC | 110 |
| APP | AAGAAGCCACAGAGAGAACCAC | 111 | TTCTTATCAGCTTTAGGCAAGTTCTT | 112 |
| FN1 | AATCCAAGCGGAGAGAGTCA | 113 | AACATTGGGTGGTGTCCACT | 114 |
| FN1 | TGACTATTGAAGGCTTGCAGC | 115 | ACTTCAGGTCAGTTGGTGCAG | 116 |
| FN1 | GTGGAGTATGTGGTTAGTGTCTATGC | 117 | CTTGTGGGTGTGACCTGAGTG | 118 |
| FN1 | AGAGTCAGCCTCTGGTTCAGAC | 119 | TCCAGTGAGCTGAACATTGG | 120 |
| FN1 | CTCAGAATCCAAGCGGAGAG | 121 | AGCTGAACATTGGGTGGTGT | 122 |
| FN1 | CAGAAATGACTATTGAAGGCTTGC | 123 | AGGTCAGTTGGTGCAGGAATAG | 124 |
| FN1 | CTGGTTCAGACTGCAGTAACCA | 125 | GTCACCCGCACTCGATATCC | 126 |
| FN1 | AGCCCACAGTGGAGTATGTGG | 127 | TGTGACCTGAGTGAACTTCAGG | 128 |
| FN1 | ATGTGGTTAGTGTCTATGCTCAGAATC | 129 | CTCAGGCTTGTGGGTGTGAC | 130 |
| FN1 | AGCGGAGAGAGTCAGCCTCT | 131 | TCGATATCCAGTGAGCTGAACA | 132 |
| FN1 | GAAGGCTTGCAGCCCACAGT | 133 | CTGAGTGAACTTCAGGTCAGTTGG | 134 |
| FN1 | TGTCTATGCTCAGAATCCAAGCG | 135 | GTGTCCACTGGGCGCTCA | 136 |
| FN1 | TCAGCCTCTGGTTCAGACTGCAGTA | 137 | GATATCCAGTGAGCTGAACATTGGGTG | 138 |
| FN1 | GCCCACAGTGGAGTATGTGGTTAGTGT | 139 | TTGTGGGTGTGACCTGAGTGAACTTCA | 140 |
| FN1 | CTATGCTCAGAATCCAAGCGGAGAGAG | 141 | GGGTGGTGTCCACTGGGCG | 142 |
| FN1 | GCTTGCAGCCCACAGTGGAGTA | 143 | GGGCGCTCAGGCTTGTGG | 144 |
| FN1 | GGATGACAAGGAAAGTGTCCC | 145 | GAGGTGTGCTCTCATGTTGTTC | 146 |
| FN1 | GGATGACAAGGAAAGTGTCCC | 145 | GTTGGTTAAATCAATGGATGGG | 147 |
| FN1 | GCCTGGAGTACAATGTCAGTGTT | 148 | TGGTGTCTGGACCAATGTTG | 149 |
| FN1 | TGCACTTTTGATAACCTGAGTCC | 150 | AGGTCAGTGGGAGGAGGAAC | 151 |
| FN1 | GGAAAGTGTCCCTATCTCTGATACC | 152 | CAGGAAGTTGGTTAAATCAATGG | 153 |
| FN1 | CACTGTCAAGGATGACAAGGAA | 154 | GTGGAGCCCAGGTGACAC | 155 |
| FN1 | ATCTCTGATACCATCATCCCAG | 156 | GTGAGTAACGCACCAGGAAGTT | 157 |
| FN1 | AGTGTTTACACTGTCAAGGATGACA | 158 | AGGTGACACGCATGGTGTCT | 159 |
| FN1 | ATAACCTGAGTCCCGGCCT | 160 | CAATGTTGGTGAATCGCAGG | 161 |
| FN1 | TGACAAGGAAAGTGTCCCTATCTC | 162 | CGCACCAGGAAGTTGGTTAA | 163 |
| FN1 | TTGGAAGAAGTGGTCCATGC | 164 | AATCGCAGGTCAGTGGGAG | 165 |
| FN1 | TGTCCCTATCTCTGATACCATCATCC | 166 | CACAGGTGAGTAACGCACCA | 167 |
| FN1 | TGATCAGAGCTCCTGCACTTT | 168 | TTGGTGAATCGCAGGTCAGT | 169 |
| FN1 | CTGTCAAGGATGACAAGGAAAGTGTCC | 170 | AATCAATGGATGGGGGTGGAG | 171 |
| FN1 | AGCTCCTGCACTTTTGATAACC | 172 | TGGACCAATGTTGGTGAATC | 173 |
| FN1 | TCCATGCTGATCAGAGCTCC | 174 | ACACGCATGGTGTCTGGACC | 175 |
| FN1 | GAAGAAGTGGTCCATGCTGATCA | 176 | AGCCCAGGTGACACGCATG | 177 |
| FN1 | CAAACGGCCAGCAGGGAAAT | 178 | ATGGTGTCTGGACCAATGTTGGTGAAT | 179 |
| FN1 | ATTCTTTGGAAGAAGTGGTCCATGCTG | 180 | GATGGGGGTGGAGCCCAGGT | 181 |
| FN1 | CCATAAGGCATAGGCCAAGA | 182 | TCAGTGCCTCCACTATGACG | 183 |
| FN1 | CTCTCAGACAACCATCTCATGG | 184 | TCAGTGCCTCCACTATGACG | 183 |
| FN1 | TCATCCTGTTGGCACTGATG | 185 | AACAACCTCTTCCCGAACCT | 186 |
| FN1 | GGCACTGATGAAGAACCCTTAC | 187 | GAACCTTATGCCTCTGCTGG | 188 |
| FN1 | TCATTTCATGTCATCCTGTTGG | 189 | TGCTGGTCTTTCAGTGCCTC | 190 |
| FN1 | CCCATTCCAGGACACTTCTG | 191 | TCCACTATGACGTTGTAGGTGG | 192 |
| FN1 | CAAGAAGCTCTCTCTCAGACAACC | 193 | TTGCCCACGGTAACAACCTC | 194 |
| FN1 | CCTGTTGGCACTGATGAAGAAC | 195 | CTTATGCCTCTGCTGGTCTTTC | 196 |
| FN1 | GGACACTTCTGAGTACATCATTTCA | 197 | TCTTCCCGAACCTTATGCCT | 198 |
| FN1 | CTGAGTACATCATTTCATGTCATCC | 199 | GGTCTTTCAGTGCCTCCACTAT | 200 |
| FN1 | CATTCCAGGACACTTCTGAGTACA | 201 | CACGGTAACAACCTCTTCCC | 202 |
| FN1 | AAGCTCTCTCTCAGACAACCATCTCAT | 203 | CAGAGTTGCCCACGGTAACA | 204 |
| FN1 | TTCATGTCATCCTGTTGGCACTGA | 205 | TAACAACCTCTTCCCGAACCTTATGCC | 206 |
| FN1 | ATCTCATGGGCCCCATTC | 207 | AGTGCCTCCACTATGACGTTGTAG | 208 |
| FN1 | ACAACCATCTCATGGGCCCC | 209 | TGGCACCTCTGGTGAGGC | 210 |
| FN1 | ATGGGCCCCATTCCAGGAC | 211 | ATGACGTTGTAGGTGGCACCTC | 212 |
| FN1 | CCATAAGGCATAGGCCAAGA | 182 | TGGCACTGGTAGAAGTTCCAG | 214 |
| FN1 | GAGGAACATGGTTTTAGGCG | 215 | TGTCAGAGTGGCACTGGTAGAA | 216 |
| FN1 | CAAATGATCTTTGAGGAACATGG | 217 | CTGGTGAGGCCTGTCAGAGT | 218 |
| FN1 | ATAGGCCAAGACCATACCCG | 219 | GTAGGTGGCACCTCTGGTGA | 220 |
| FN1 | ACCATACCCGCCGAATGTAG | 221 | AGGCCTGTCAGAGTGGCAC | 222 |
| FN1 | GATCTTTGAGGAACATGGTTTTAGG | 223 | CACCTCTGGTGAGGCCTGTC | 224 |
| FN1 | ACCACACCGCCCACAACG | 225 | AGAGTTGCCCACGGTAACAACCTCTTC | 226 |
| FN1 | TAAGGCATAGGCCAAGACCATAC | 227 | TAGGTTGGTTCAAGCCTTCG | 228 |
| FN1 | CACCCCCATAAGGCATAGG | 229 | TCATCCGTAGGTTGGTTCAAG | 230 |
| FN1 | AACGGCCACCCCCATAAG | 231 | AAGCACGAGTCATCCGTAGG | 232 |
| FN1 | CCAAGACCATACCCGCCGAA | 233 | CACGAGTCATCCGTAGGTTGGTT | 234 |
| FN1 | TTTAGGCGGACCACACCG | 235 | GGGTCAAAGCACGAGTCATC | 236 |
| FN1 | ACATGGTTTTAGGCGGACCA | 237 | AACTGTGTAGGGGTCAAAGCAC | 238 |
| FN1 | ACCGCCCACAACGGCCAC | 239 | GTCAAAGCACGAGTCATCCGTAGGTTG | 240 |
| FN1 | GGGCAACAAATGATCTTTGAGG | 241 | GTGTAGGGGTCAAAGCACGAGTCA | 242 |
| FN1 | GGACTCAATCCAAATGCCTC | 243 | GTTCCCACTCATCTCCAACG | 244 |
| FN1 | ATGCCTCTACAGGACAAGAAGC | 245 | TTCAGACATTCGTTCCCACTC | 246 |
| FN1 | AGACTATCACCTGTACCCACACG | 247 | CATCTCCAACGGCATAATGG | 248 |
| FN1 | ACAGGACAAGAAGCTCTCTCTCAG | 249 | CTGGCACAACAGTTTAAAGCC | 250 |
| FN1 | CCAGGGAAGATGTAGACTATCACC | 251 | CGGCATAATGGGAAACTGTG | 252 |
| FN1 | CAATCCAAATGCCTCTACAGG | 253 | ACATTCGTTCCCACTCATCTCC | 254 |
| FN1 | GAAATCCAAATTGGTCACATCC | 255 | AATGGGAAACTGTGTAGGGGTC | 256 |
| FN1 | GTCCGGGACTCAATCCAAAT | 257 | CCTAAGCACTGGCACAACAGT | 258 |
| FN1 | ACACGGTCCGGGACTCAATC | 259 | CTCCAACGGCATAATGGGAAACT | 260 |
| FN1 | ACCTGTACCCACACGGTCCG | 261 | CCCACTCATCTCCAACGGCATAA | 262 |
| FN1 | AAGATGTAGACTATCACCTGTACCCAC | 263 | GCCTGATTCAGACATTCGTTC | 264 |
| FN1 | TGGTCACATCCCCAGGGAAGAT | 265 | CAACGGCATAATGGGAAACTGTGTAGG | 266 |
| FN1 | TACCCACACGGTCCGGGACT | 267 | CTAAGCACTGGCACAACAGTTTAAAGC | 268 |
| FN1 | ACATCCCCAGGGAAGATGTAGAC | 269 | TTTAAAGCCTGATTCAGACATTCG | 270 |
| FN1 | AGGTGAGGAAATCCAAATTGG | 271 | TTCCAAAGCCTAAGCACTGG | 272 |
| FN1 | GCCGAATGTAGGTGAGGAAA | 273 | GACCACTTCCAAAGCCTAAGC | 274 |
| FN1 | CCGAATGTAGGTGAGGAAATCCAAAT | 275 | CCAAAGCCTAAGCACTGGCACAAC | 276 |
| FN1 | AATAATCAGAAGAGCGAGCCC | 277 | ACTGGGTTGCTGACCAGAAG | 278 |
| FN1 | CCCCTGATTGGAAGGAAAA | 279 | CTCAAAGATCATTTGTTGCCC | 280 |
| FN1 | AGAAGAGCGAGCCCCTGATT | 281 | TCCGCCTAAAACCATGTTCC | 282 |
| FN1 | CCTGATTGGAAGGAAAAAGACAG | 283 | GGTATGGTCTTGGCCTATGC | 284 |
| FN1 | AGCGAGCCCCTGATTGGAAG | 285 | ATTTGTTGCCCAACACTGGG | 286 |
| FN1 | ATAATCAGAAGAGCGAGCCCCTGATTG | 287 | CGTTGTGGGCGGTGTGGTC | 288 |
| FN1 | CAATTTATGTCATTGCCCTGAAG | 289 | GGAAGCTGAATACCATTTCCAG | 290 |
| FN1 | CCGGGAACCGAATATACAATT | 291 | ACCATTTCCAGTGTCATACCCA | 292 |
| FN1 | GCCCTGAAGAATAATCAGAAGAGC | 293 | TGACCAGAAGTGCCAGGAAG | 294 |
| FN1 | TGTCATTGCCCTGAAGAATAATC | 295 | GAAGTGCCAGGAAGCTGAATAC | 296 |
| FN1 | TGGAACCGGGAACCGAATAT | 297 | CTTGGCCTATGCCTTATGGG | 298 |
| FN1 | AACCGAATATACAATTTATGTCATTGC | 299 | CCATGTTCCTCAAAGATCATTTG | 300 |
| FN1 | CCTGGAACCGGGAACCGAATATACAAT | 301 | GGTATGGTCTTGGCCTATGCCTTATGG | 302 |
| FN1 | CATCAAGTATGAGAAGCCTGGG | 303 | AGGGTGGGTGACGAAAGG | 304 |
| FN1 | CAGGATTACCGGCTACATCATC | 305 | GTGACGAAAGGGGTCTTTTG | 306 |
| FN1 | CCTGGTGTCACAGAGGCTACTAT | 307 | CTACATTCGGCGGGTATGGT | 308 |
| FN1 | CACACCCAATTCCTTGCTG | 309 | GCTGAATACCATTTCCAGTGTCAT | 310 |
| FN1 | TTCCTTGCTGGTATCATGGC | 311 | CCAACACTGGGTTGCTGAC | 312 |
| FN1 | TCTCCTCCCAGAGAAGTGGTC | 313 | GCCTAAAACCATGTTCCTCAAAG | 314 |
| FN1 | CCGGCTACATCATCAAGTATGAG | 315 | CAGTGTCATACCCAGGGTGG | 316 |
| FN1 | TATGAGAAGCCTGGGTCTCCT | 317 | GGTGTGGTCCGCCTAAAAC | 318 |
| FN1 | CCCAATTCCTTGCTGGTATC | 319 | GTTGCTGACCAGAAGTGCCA | 320 |
| FN1 | CCACGTGCCAGGATTACC | 321 | AAGATCATTTGTTGCCCAACACT | 322 |
| FN1 | GCTACATCATCAAGTATGAGAAGCCTG | 323 | TCATACCCAGGGTGGGTGAC | 324 |
| FN1 | CAGAGAAGTGGTCCCTCGG | 325 | CTATGCCTTATGGGGGTGG | 326 |
| FN1 | AAGCCTGGGTCTCCTCCCAG | 327 | GTGTGGTCCGCCTAAAACCATGTT | 328 |
| FN1 | TGCACCATCCAACCTGCGTT | 329 | AGTGCCAGGAAGCTGAATACCATTTCC | 330 |
| FN1 | GCGTTTCCTGGCCACCACAC | 331 | ATACCCAGGGTGGGTGACGAAAGG | 332 |
| FN1 | CCTGGGTCTCCTCCCAGAGAAGT | 333 | TTATGGGGGTGGCCGTTGTG | 334 |
| FN1 | CCCGCCCTGGTGTCACAGAG | 335 | TTCGGCGGGTATGGTCTTGG | 336 |
| FN1 | CTGGTATCATGGCAGCCG | 337 | TTTCCTCACCTACATTCGGC | 338 |
| AXIN1 | CATGCAGTGGATCATTGAGG | 339 | ACCTTCCTCTGCGATCTTGTC | 340 |
| AXIN1 | CTCCCACCTCTTCATCCAAG | 341 | ACCTTCCTCTGCGATCTTGTC | 340 |
| AXIN1 | TCCAGACCCTTGTCCCTTGA | 342 | CAGAAGTAGTACGCCACAACGA | 343 |
| AXIN1 | CCATGAGAACTCCAGACCCTT | 344 | CCACAACGATGCTGTCACAC | 345 |
| AXIN1 | TTCATCCAAGACCCCACCAT | 346 | TCAGCAGCTCCTTGAACTGG | 347 |
| AXIN1 | ACGTCTGGAGGAGGAAGAAA | 348 | TAGCTGCCCTTTTTGGTCAG | 349 |
| AXIN1 | GGACGAGGAAGCCACAGC | 350 | AGTACGCCACAACGATGCTG | 351 |
| AXIN1 | ACCTCTTCATCCAAGACCCC | 352 | TTTGGTCAGCAGCTCCTTGA | 353 |
| AXIN1 | CAGCCCTCCCACCTCTTCAT | 354 | CCGCCCACCTTCCTCTGC | 355 |
| AXIN1 | AGCTCCCAACCCCCTAACC | 356 | GATGCTGTCACACGGCTG | 357 |
| AXIN1 | CGAGCACCCTCCAAGCAGAG | 358 | TCCTTGAACTGGCCCAGGGT | 359 |
| AXIN1 | AAAGAGAGCCAGCCGAGCAC | 360 | CCTCACCAGGGTGCGGTAG | 361 |
| AXIN1 | ACCCTTGTCCCTTGAGCACC | 362 | CACACGGCTGGGCACTCC | 363 |
| AXIN1 | ACCTCCGTGCAGCCCTCC | 364 | GAAGTAGTACGCCACAACGATGCTGTC | 365 |
| AXIN1 | TAACCCAGCTGGAGGAGGC | 366 | AGGGTGCGGTAGGGGATG | 367 |
| AXIN1 | TGAGAACTCCAGACCCTTGTCCCT | 368 | ACTCCCGCCGCCCACCTT | 369 |
| AXIN1 | AAGACCCCACCATGCCAC | 370 | CCCTTTTTGGTCAGCAGGTC | 371 |
| AXIN1 | AGCCACAGCCCCATGAGAAC | 372 | ATGGGTTCCCCGCAGAAGTA | 373 |
| AXIN1 | TTCGGGGACGAGGAAGCCAC | 374 | GCTGTCACACGGCTGGGCAC | 375 |
| AXIN1 | CGCCGACGTCTGGAGGAG | 376 | GAACTGGCCCAGGGTGACAG | 377 |
| AXIN1 | ACCATGCCACCCCACCCAG | 378 | CTTTTTGGTCAGCAGCTCCTTGAACTG | 379 |
| AXIN1 | CTCAGCTCCGGACCTCCGTG | 380 | GTAGGGGATGGGTTCCCCGC | 381 |
| AXIN1 | GGAAGAAAAGAGAGCCAGCCGAGC | 382 | CGGCCCCTCACCAGGGTG | 383 |
| AXIN1 | CAACCCCCTAACCCAGCT | 384 | ACAGTCAAACTCGTCGCTCAC | 385 |
| AXIN1 | CCCACCCAGCTCCCAACC | 386 | GTCAAACTCGTCGCTCACTTTCTT | 387 |
| AXIN1 | CCAGCCGAGCACCCTCCAAG | 388 | GACGGCCTCGTCCTCTCGAA | 389 |
| AXIN1 | CCCCCTAACCCAGCTGGAGG | 390 | AACTCGTCGCTCACTTTCTTGAAGTAG | 391 |
| AXIN1 | CTTGAGCACCCCTGGGCC | 392 | CCACCCCACAGTCAAACTCG | 393 |
| BCMP11 | AAGAGCACTGGCCAAGTCAG | 394 | CCTCCAGGTGATGAATAACCA | 395 |
| BCMP11 | AGAAACATCCAGAATACATTTCCAAC | 396 | TTTTGAGCATAAAAGAGACCTTCTTC | 397 |
| BCMP11 | TTTCCAACAAGAGCACTGGC | 398 | TTGACAATCCTCCAGGTGATG | 399 |
| BCMP11 | TCCAACAAGAGCACTGGCCAAGTC | 400 | TGACAATCCTCCAGGTGATGAATAACC | 401 |
| BCMP11 | AATACATTTCCAACAAGAGCACTGGCC | 402 | CTCCAGGTGATGAATAACCATTAATGG | 403 |
| BMP4 | CGAGAAGGCAGAGGAGGAG | 404 | CAAACTTGCTGGAAAGGCTC | 405 |
| BMP4 | GAAAGAGGAGGAAGGAAGATGC | 406 | GCCAATCTTGAACAAACTTGC | 407 |
| BMP4 | AAGAAAGAAAGCGAGGGAGG | 408 | GAAAGGCTCAGGGAAGCTG | 409 |
| BMP4 | GAAGGAAGATGCGAGAAGGC | 410 | CAGTCCATGATTCTTGACAGCC | 411 |
| BMP4 | AAGATGCGAGAAGGCAGAGG | 412 | ACAAGGCATATAATAACAGTCCATGA | 413 |
| BMP4 | AAAGCGAGGGAGGGAAAGAG | 414 | TTGACAGCCAATCTTGAACAAA | 415 |
| BMP4 | GAGGAGGAAGGAAGATGCGAGAAG | 416 | TTGCTGGAAAGGCTCAGGGAA | 417 |
| BMP4 | AGCCCGGCCCGGAAGCTAG | 418 | ATGGCTCGCGCCTCCTAGC | 419 |
| BMP4 | GGAAGGAGCGCGGAGCCC | 420 | CTAGCATGGCTCGCGCCTCC | 421 |
| BTC | ACCACCACACAATCAAAGCG | 422 | TTACGACGTTTCCGAAGAGG | 423 |
| BTC | CCCAAGCAATACAAGCATTACTG | 424 | CCCAGAGTTTCCATTTCTTCTTC | 425 |
| BTC | ACTGCATCAAAGGGAGATGC | 426 | GGAGTTATATCTTTACCCAGAGTTTCC | 427 |
| BTC | ACAAGCATTACTGCATCAAAGG | 428 | TCTTTACCCAGAGTTTCCATTTCT | 429 |
| BTC | AAAGCGGAAAGGCCACTTCT | 430 | TGTCTCTTCAATATCTTCATTGATAGG | 431 |
| BTC | CAAAGGGAGATGCCGCTT | 432 | CATTGATAGGAGTTATATCTTTACCCA | 433 |
| BTC | GCCACTTCTCTAGGTGCCCCAAG | 434 | TCTTCTTTCTTTTACGACGTTTCCGA | 435 |
| BTC | AGCAGACGCCCTCCTGTGT | 436 | TTCCTGAGACACATTCTGTCCA | 437 |
| BTC | GATGCCGCTTCGTGGTGG | 438 | CAAATGAGCAAGGCACTTTGC | 439 |
| BTC | AAGCAATACAAGCATTACTGCATCAAA | 440 | CACCAACCTGGAGGTAACTTCA | 441 |
| BTC | TTCGTGGTGGCCGAGCAGAC | 442 | GGCACTTTGCAGCTTGCCAC | 443 |
| BTC | AAGCATTACTGCATCAAAGGGAGATGC | 444 | TTGCAGCTTGCCACCAACCT | 445 |
| BTC | AGGGAGATGCCGCTTCGTGG | 446 | GAGCAAGGCACTTTGCAGCTTG | 447 |
| BTC | ACAATCAAAGCGGAAAGGCCACTT | 448 | GCTTGCCACCAACCTGGAGG | 449 |
| BTC | AAAGCGGAAAGGCCACTTCTCTAGGTG | 450 | GTCCATTTTCAAATGAGCAAGGCACT | 451 |
| BTC | AGACCCTGAGGAAAACTGTGC | 452 | CCTGGAGGTAACTTCATAGCCT | 453 |
| BTC | TCCTCTGTGGAGACCCTGAG | 454 | AGCTGTTTTCCTGAGACACATTC | 455 |
| BTC | TGTGGAGACCCTGAGGAAAA | 456 | GTCTACTAGCTGTTTTCCTGAGACAC | 457 |
| C11 | AGCCATGGACAACTGTTTGG | 458 | CATGCTCTGATATTTGATAGCTGC | 459 |
| C11 | AGCCATGGACAACTGTTTGG | 458 | GACTCGCCTCTGTGATAACGAT | 461 |
| C11 | TCTAGAAGTGCTGGAGAGGGC | 462 | AACGATAGACATGGGTTGCC | 463 |
| C11 | CAAGGCTGGCTCTAGAAGTGC | 464 | GACCATTCCCTATGTCCAAGC | 465 |
| C11 | CCCACCTAGAGAAACAGCCG | 466 | ATGTCCAAGCACATGTGCAG | 467 |
| C11 | GTTCAGCAAGGCTGGCTCTA | 468 | CTTCCTCTGGCACAGATGAAT | 469 |
| C11 | CCTGCAGCGTTCAGCAAG | 470 | TCCCTATGTCCAAGCACATG | 471 |
| C11 | CTGGAGAGGGCCAAGAGGAG | 472 | ACATGTGCAGCTTCGACTCG | 473 |
| C11 | TGAATGGGGTGGACCGAC | 474 | CTCTGTGATAACGATAGACATGGG | 475 |
| C11 | ACCGACGTTCCCTGCAGC | 476 | GTTGCCCCTCCTTCCTCTG | 477 |
| C11 | AAGAGGAGGGCGGTGGACTG | 478 | CAAGCACATGTGCAGCTTCG | 479 |
| C11 | GTCCCAAAGGCTGCATGG | 480 | TAGACATGGGTTGCCCCTCC | 481 |
| C11 | ACGTTCCCTGCAGCGTTCAG | 482 | CCCTCCTTCCTCTGGCACA | 483 |
| C11 | GACTGGCATGCCCTGGAG | 484 | TCCTCTGGCACAGATGAATAATATTT | 485 |
| C11 | ATGCCCTGGAGCGTCCCAAAG | 486 | ACCATTCCCTATGTCCAAGCACATGTG | 487 |
| C11 | GCAGCGTTCAGCAAGGCTGG | 488 | GATAACGATAGACATGGGTTGCCCCTC | 489 |
| C11 | CTAGAGAAACAGCCGGCAGC | 490 | CATGCTCTGATATTTGATAGCTGC | 459 |
| C11 | GGAGCGTCCCAAAGGCTGC | 492 | TGCCTCCAGGACCAAGGGAT | 493 |
| C11 | AGGCGCCCCACCTAGAGAAA | 494 | CCAGGACCAAGGGATGTCTTT | 495 |
| C11 | AGGGCGGTGGACTGGCATG | 496 | TGGGATGCCTCTGGAGCATG | 497 |
| C11 | GAAGTGCTGGAGAGGGCCAAGAG | 498 | TCTGATATTTGATAGCTGCCTCCAGG | 499 |
| C11 | CTGCATGGGGGTCCTTGC | 500 | GCCTCTGGAGCATGCTCTGATAT | 501 |
| C11 | AAAGGCTGCATGGGGGTC | 502 | ATAGCTGCCTCCAGGACCAA | 503 |
| C11 | GGTGGACCGACGTTCCCT | 504 | TCTGGAGCATGCTCTGATATTTGATAG | 505 |
| C11 | AGCGCTGAATGGGGTGGAC | 506 | GTAGAGGTCCTTAGAGATGTTCTCAGC | 507 |
| C11 | TGTTCAAGGCCAAGGTGAAG | 508 | TCAAAGAAGTAGGACCGAGAGG | 509 |
| C11 | TGTTCAAGGCCAAGGTGAAG | 508 | CAGTAGCTCCCACACGAAGAG | 510 |
| C11 | GCCAAGGTGAAGCGTCGG | 511 | AGGGTGGTGGGCAGTAGCTC | 512 |
| C11 | GGAGATGAGCCGAGGCTT | 513 | GGAAGAAGCCCACCAGCAG | 514 |
| C11 | AAGCGTCGGCCGGAGATGAG | 515 | CCCACCAGCAGGGTGGTGG | 516 |
| C11 | TCACCTTGACGCTTATGAACC | 517 | AGGTAGCCTTTGTTCCCCAG | 518 |
| C11 | TGCAGTTCTTCACCTTGACG | 519 | TTGTTCCCCAGGTCATTCAC | 520 |
| C11 | CGCTTATGAACCTCTACTTTGCC | 521 | GCCAAATACCAGGTAGCCTTTG | 522 |
| C11 | CGTCTGCCTGCAGTTCTTCA | 523 | CCAGGTCATTCACCAGGTCC | 524 |
| C11 | CACCTTGACGCTTATGAACCTCTACTT | 525 | GTAGCCTTTGTTCCCCAGGTCATT | 526 |
| C11 | ACTCCCTGTTCGTCATCTGC | 527 | TTGTTCCCCAGGTCATTCAC | 520 |
| C11 | CGCGCTGTCTCTTGCTGC | 529 | GCCAAATACCAGGTAGCCTTTG | 522 |
| C11 | GCGCCCTCCACTAGCATCTA | 531 | GGAAGAAGCCCACCAGCAG | 514 |
| C11 | TGAGCGACTCCCTGTTCGTC | 533 | CCAGGTCATTCACCAGGTCC | 524 |
| C11 | TCTTGCTGCCTGCCTCTG | 535 | CAGTAGCTCCCACACGAAGAG | 510 |
| C11 | GTTCGTCATCTGCGCGCT | 537 | AGGTAGCCTTTGTTCCCCAG | 518 |
| C11 | CTCTGCCTCGTCGCCAGG | 539 | AGGGTGGTGGGCAGTAGCTC | 512 |
| C11 | GTCATCTGCGCGCTGTCTCTT | 541 | GTAGCCTTTGTTCCCCAGGTCATT | 526 |
| C11 | GCCCTCCACTAGCATCTACCTGGA | 543 | CCCACCAGCAGGGTGGTGG | 516 |
| C11 | CTGTCTCTTGCTGCCTGCCT | 545 | GGATGAGGCCAAATACCAGG | 546 |
| C11 | GCCTGCCTCTGCCTCGTC | 547 | CTCCCACACGAAGAGGATGAG | 548 |
| C11 | GCATCTACCTGGAGGCCAAG | 549 | GTGCACCCGGAAGAAGCC | 550 |
| C11 | GTCCTGGTGAGCGACTCCCT | 551 | CGAAGAGGATGAGGCCAAAT | 552 |
| C11 | CTGCTGCTTGTCCGCGTC | 553 | AATACCAGGTAGCCTTTGTTCCCC | 554 |
| C11 | TGGGCCCTGCTGCTTGTC | 555 | GTGGGCAGTAGCTCCCACAC | 556 |
| C11 | TGTGCTGTGCTCTCCCATC | 557 | CAGTAGCTCCCACACGAAGAG | 510 |
| C11 | CTTGTCCGCGTCCTGGTGAG | 559 | GTCCTGTGGGGGCCGGTG | 560 |
| C11 | CTTGCTGCCTGCCTCTGCCT | 561 | CACCCGGAAGAAGCCCACCA | 562 |
| C11 | GTGCTGTGTGCTGTGCTCTC | 563 | ATTGAGGATGTGGCTGGTGC | 564 |
| C11 | TCTTTCTGCTGGTGAACGTG | 565 | CTGCCCATTGAGGATGTGG | 566 |
| C11 | ACAGCCCTGGGCCCTGCT | 567 | AGGCAAAGACCTGCCCATTG | 568 |
| C11 | GTGCTCTCCCATCGGCGC | 569 | CAAAGACCTGCCCATTGAGGATG | 570 |
| C11 | AGTTCTTCACCTTGACGCTTATG | 571 | CTCCCACACGAAGAGGATGAG | 548 |
| C11 | GGCTTCTCTACTGCTGCCC | 573 | GGATGAGGCCAAATACCAGG | 546 |
| C11 | CCTTGCCCTTCTGGCTTCTCTA | 575 | AATACCAGGTAGCCTTTGTTCCCC | 554 |
| C11 | CCTTCTGGCTTCTCTACTGCTG | 577 | CGAAGAGGATGAGGCCAAAT | 552 |
| C11 | TCTACTGCTGCCCCGTCTG | 579 | GTGGGCAGTAGCTCCCACAC | 556 |
| C11 | AGATACTCCCCGCGCCAAC | 581 | GTGCACCCGGAAGAAGCC | 550 |
| C11 | CTGCCCCGTCTGCCTGCA | 583 | CACCCGGAAGAAGCCCACCA | 562 |
| C11 | TGGGGCCCTTGCCCTTCTG | 585 | GTCCTGTGGGGGCCGGTG | 560 |
| CCNE1 | CACAGGGAGACCTTTTACTTGG | 587 | TCAAGGCAGTCAACATCCAG | 588 |
| CCNE1 | ATCCTCCAAAGTTGCACCAG | 589 | TCAAGGCAGTCAACATCCAG | 588 |
| CCNE1 | GCACCAGTTTGCGTATGTGA | 590 | ATGATACAAGGCCGAAGCAG | 591 |
| CCNE1 | GACAGATGGAGCTTGTTCAGG | 592 | GATGACGAGAAATGATACAAGGC | 593 |
| CCNE1 | TTGCGTATGTGACAGATGGAG | 594 | GCCGAAGCAGCAAGTATACC | 595 |
| CCNE1 | GGAGCTTGTTCAGGAGATGAAA | 596 | TGCATCAATTCAGATGACGAG | 597 |
| CCNE1 | CCAAAGTTGCACCAGTTTGC | 598 | ACCATAAGGAAATTCAAGGCAG | 599 |
| CCNE1 | GAAATCTATCCTCCAAAGTTGCAC | 600 | GTCAACATCCAGGACACAGAGA | 601 |
| CCNE1 | GGAGATGAAATTCTCACCATGG | 602 | TGAAACCTTTTGCATCAATTCA | 603 |
| CCNE1 | GTATGTGACAGATGGAGCTTGTTC | 604 | TCAATTCAGATGACGAGAAATGAT | 605 |
| CCNE1 | ACCAGTTTGCGTATGTGACAGATG | 606 | TACAAGGCCGAAGCAGCAAGTA | 607 |
| CCNE1 | AAAGTTGCACCAGTTTGCGTATGT | 608 | AGGAAATTCAAGGCAGTCAACA | 609 |
| CCNE1 | TGTTCAGGAGATGAAATTCTCACC | 610 | ACCTTTTGCATCAATTCAGATGAC | 611 |
| CCNE1 | CTATCCTCCAAAGTTGCACCAGTTTGC | 612 | CGAGAAATGATACAAGGCCGAAGC | 613 |
| CCNE1 | AGATGAAATTCTCACCATGGAATTAAT | 614 | CGAAGCAGCAAGTATACCATAAGG | 615 |
| CCNE1 | CACAGGGAGACCTTTTACTTGG | 587 | CCAGGACACAGAGATCCAACA | 617 |
| CCNE1 | GGGAGACCTTTTACTTGGCACAAG | 618 | AAGGCAGTCAACATCCAGGACACA | 619 |
| CCNE1 | TTATTTATTGCAGCCAAACTTGAG | 620 | ACACAGTTCTCTATGTCGCACC | 621 |
| CCNE1 | ACAGCTTATTGGGATTTCATCTTT | 622 | CCACTTGACACAGTTCTCTATGTCG | 623 |
| CCNE1 | ACTCTTTTACAGCTTATTGGGATTTC | 624 | TGGAACCATCCACTTGACAC | 625 |
| CCNE1 | GGCGACACAAGAAAATGTTGT | 626 | TAACCATGGCAAATGGAACC | 627 |
| CCNE1 | TTCTTTGACCGGTATATGGCG | 628 | ACAGTTCTCTATGTCGCACCACTGATA | 629 |
| CCNE1 | CGGTATATGGCGACACAAGA | 630 | CCCTTATAACCATGGCAAATGG | 631 |
| CCNE1 | TTTGACCGGTATATGGCGACACAA | 632 | AATGGAACCATCCACTTGACACAGTTC | 633 |
| CCNE1 | GGTATATGGCGACACAAGAAAATGTT | 634 | CTTATAACCATGGCAAATGGAACCATC | 635 |
| CCNE1 | TCTGCAGCCAAAAATGCGAG | 636 | GAAATTCAAGGCAGTCAACATCCAGGA | 637 |
| CHEK2 | CAGCTCTCAATGTTGAAACAGAA | 638 | TCTGGCTTTAAGTCACGGTGT | 639 |
| CHEK2 | CAGCTCTCAATGTTGAAACAGAA | 638 | ACAGCCAAGAGCATCTGGTAA | 641 |
| CHEK2 | GGAAGTTTGCTATTGGTTCAGC | 642 | GCTTCTTTCAGGCGTTTATTCC | 643 |
| CHEK2 | GAAAGTAGCCATAAAGATCATCAGC | 644 | CACTTTGTCAAACAGCTCTCCC | 645 |
| CHEK2 | CCTGTGGAGAGGTAAAGCTGG | 646 | CAGGTAGCTTCTTTCAGGCG | 647 |
| CHEK2 | CATCAGCAAAAGGAAGTTTGC | 648 | GCGTTTATTCCCCACCACTT | 649 |
| CHEK2 | TAAAGCTGGCTTTCGAGAGG | 650 | CCCACCACTTTGTCAAACAG | 651 |
| CHEK2 | GCAAAAGGAAGTTTGCTATTGG | 652 | TTATTCCCCACCACTTTGTCAA | 653 |
| CHEK2 | CCATAAAGATCATCAGCAAAAGG | 654 | AACAGCTCTCCCCCTTCCAT | 655 |
| CHEK2 | CTATTGGTTCAGCAAGAGAGGC | 656 | TGGTAAAAATAGAGCTTGCAGGTAGC | 657 |
| CHEK2 | GCTGGCTTTCGAGAGGAAAACA | 658 | GCAGGTAGCTTCTTTCAGGCGTTTATT | 659 |
| CHEK2 | TGGAGAGGTAAAGCTGGCTTTCG | 660 | TTTCAGGCGTTTATTCCCCACCAC | 661 |
| CHEK2 | TGGCTTTCGAGAGGAAAACATGTAAGA | 662 | TTGTCAAACAGCTCTCCCCCTTCC | 663 |
| CHEK2 | TGGTGCCTGTGGAGAGGTAA | 664 | TCTGGCTTTAAGTCACGGTGT | 639 |
| CHEK2 | CATGTAAGAAAGTAGCCATAAAGATCA | 666 | GACAGTCCTCTTCTTGAGATGACA | 667 |
| CHEK2 | AAGTTTGCTATTGGTTCAGCAAGAGAG | 668 | CACGGTGTATAATACCGTTTTCATG | 669 |
| CHEK2 | GCACTGTCACTAAGCAGAAATAAAG | 670 | CTTGGAGTGCCCAAAATCAG | 671 |
| CHEK2 | TGATCAGTCAGTTTATCCTAAGGC | 672 | CTTGGAGTGCCCAAAATCAG | 671 |
| CHEK2 | TGAAATTGCACTGTCACTAAGCA | 673 | AATCTTGGAGTGCCCAAAATCAGTAAT | 674 |
| DNMT3B | CAAGAGGGACATCTCACGGT | 675 | AGTGCACAGGAAAGCCAAAG | 676 |
| DNMT3B | GCCATCAAAGTTTCTGCTGC | 677 | AGTGCACAGGAAAGCCAAAG | 676 |
| DNMT3B | AATCCAGTGATGATTGATGCC | 678 | TTGGACACGTCTGTGTAGTGC | 679 |
| DNMT3B | AGTTTCTGCTGCTCACAGGG | 680 | AAGAGGTGTCGGATGACAGG | 681 |
| DNMT3B | CGATACTTCTGGGGCAACCTA | 682 | TGGCTGGAACTATTCACATGC | 683 |
| DNMT3B | TCACAGGGCCCGATACTTCT | 684 | CATGCAAAGTAGTCCTTCAGAGG | 685 |
| DNMT3B | CATCAAAGTTTCTGCTGCTCACAG | 686 | TCAGGAATCACACCTCCTGG | 687 |
| DNMT3B | AACCTACCCGGGATGAACAG | 688 | TATGACCCACACAGCTGAGG | 689 |
| DNMT3B | GTGATGATTGATGCCATCAAAG | 690 | CGTCTGTGTAGTGCACAGGAAA | 691 |
| DNMT3B | ATTGATGCCATCAAAGTTTCTGC | 692 | AATCACACCTCCTGGGTCCT | 693 |
| DNMT3B | GCTGCTCACAGGGCCCGATA | 694 | GGCTGGAACTATTCACATGCAAAGTAG | 695 |
| DNMT3B | TCTGGGGCAACCTACCCGG | 696 | TTCAGAGGGGCGAAGAGGTG | 697 |
| DNMT3B | GGGCCCGATACTTCTGGGGC | 698 | CCTGGGGATGCCTTCAGGAAT | 699 |
| DNMT3B | CAAGAGGGACATCTCACGGT | 675 | ATGACAGGCACGCTCCAG | 701 |
| DNMT3B | CCGTTCTTCTGGATGTTTGAG | 702 | CCATGTTGGACACGTCTGTG | 703 |
| DNMT3B | TGAATTACTCACGCCCCAAG | 704 | AGGACCTTCCCAGCAGCTTC | 705 |
| DNMT3B | GTTGTAGCCATGAAGGTTGGC | 706 | GGGCGAAGAGGTGTCGGAT | 707 |
| DNMT3B | GGATGTTTGAGAATGTTGTAGCC | 708 | TAGTCCTTCAGAGGGGCGAA | 709 |
| DNMT3B | ACATCTCACGGTTCCTGGAG | 710 | CTATTCACATGCAAAGTAGTCCTTCA | 711 |
| DNMT3B | CACCTGCTGAATTACTCACGC | 712 | ACGGCCCATGTTGGACAC | 713 |
| DNMT3B | ATGAAGGTTGGCGACAAGAG | 714 | GGGCCTGGCTGGAACTATTC | 715 |
| DNMT3B | TGAGAATGTTGTAGCCATGAAGG | 716 | CACGCTCCAGGACCTTCC | 717 |
| DNMT3B | CGTTCTTCTGGATGTTTGAGAATGTTG | 718 | AGCTTCTGGCGGGCACCAC | 719 |
| DNMT3B | GGTTGGCGACAAGAGGGACAT | 720 | GTCGGATGACAGGCACGCTC | 721 |
| DNMT3B | GCCCCAAGGAGGGTGATGAC | 722 | GTGTAGTGCACAGGAAAGCCAAAGATC | 723 |
| DNMT3B | GTAGCCATGAAGGTTGGCGACAAG | 724 | ACAGGCACGCTCCAGGACCT | 725 |
| DNMT3B | AGAGGGACATCTCACGGTTCCTGG | 726 | GCTCTGCCACACACCCCAGT | 727 |
| DNMT3B | GGCCGGCTCTTCTTCGAATT | 728 | GCACCACGGCCCATGTTG | 729 |
| DNMT3B | AGGGTGATGACCGGCCGTT | 730 | GCTCCAGGACCTTCCCAGCA | 731 |
| DNMT3B | ACCGGCCGTTCTTCTGGAT | 732 | AAAGTAGTCCTTCAGAGGGGCGAAGAG | 733 |
| DNMT3B | TACTCACGCCCCAAGGAGGG | 734 | GTCCTGGCTCTGCCACACAC | 735 |
| DNMT3B | CATCAAAGTTTCTGCTGCTCAC | 736 | TCAGGAATCACACCTCCTGG | 687 |
| DNMT3B | TTCTTCGAATTTTACCACCTGC | 738 | AGTGCACAGGAAAGCCAAAG | 676 |
| DNMT3B | TTTTACCACCTGCTGAATTACTCA | 740 | TCCTGGGTCCTGGCTCTG | 741 |
| DNMT3B | CGGCTCTTCTTCGAATTTTACCAC | 742 | ACACCCCAGTGGGCTTGG | 743 |
| DNMT3B | CTTCGAATTTTACCACCTGCTGAATTA | 744 | CAGTGGGCTTGGGGCCTG | 745 |
| DNMT3B | TACAGGCCGGCTCTTCTTCGAATTTTA | 746 | GCTTGGGGCCTGGCTGGA | 747 |
| DNMT3B | TTTCTGCTGCTCACAGGGC | 748 | AAGAGGTGTCGGATGACAGG | 681 |
| DNMT3B | CTTCGAATTTTACCACCTGCTGAATTA | 744 | GCTTGGGGCCTGGCTGGA | 747 |
| DNMT3B | AATCCAGTGATGATTGATGCC | 678 | GTTTGATCGAGTTCGACTTGG | 753 |
| DNMT3B | AGTTTCTGCTGCTCACAGGG | 680 | CTTCTTTGCCATTCATGACAAC | 755 |
| DNMT3B | GCCATCAAAGTTTCTGCTGC | 677 | ACCACAAAACATCTTCTTTGCC | 757 |
| DNMT3B | TCACAGGGCCCGATACTTCT | 684 | CCATTCATGACAACAGGGAAA | 759 |
| DNMT3B | AACCTACCCGGGATGAACAG | 688 | TTTCGAGCTCAGTGCACCAC | 761 |
| DNMT3B | CGATACTTCTGGGGCAACCTA | 682 | AAACATCTTCTTTGCCATTCATG | 763 |
| DNMT3B | GTGATGATTGATGCCATCAAAG | 690 | TGGTTTTTCCCCTGTTTGATC | 765 |
| DNMT3B | CATCAAAGTTTCTGCTGCTCACAG | 686 | CATGACAACAGGGAAAAGTTGG | 767 |
| DNMT3B | ATTGATGCCATCAAAGTTTCTGC | 692 | CTCAGTGCACCACAAAACATCT | 769 |
| DNMT3B | GCTGCTCACAGGGCCCGATA | 694 | GACAACAGGGAAAAGTTGGTTTTTCC | 771 |
| DNMT3B | GGGCCCGATACTTCTGGGGC | 698 | AGGGAAAAGTTGGTTTTTCCCCTGTTT | 773 |
| DNMT3B | CCGTTCTTCTGGATGTTTGAG | 702 | TCGACTTGGTGGTTATTGTCTG | 775 |
| DNMT3B | GTTGTAGCCATGAAGGTTGGC | 706 | TCCCCTGTTTGATCGAGTTC | 777 |
| DNMT3B | GGATGTTTGAGAATGTTGTAGCC | 708 | TCGAGTTCGACTTGGTGGTT | 779 |
| DNMT3B | CACCTGCTGAATTACTCACGC | 712 | GACTTGGTGGTTATTGTCTGTACTTTC | 781 |
| DNMT3B | GGCCGGCTCTTCTTCGAATT | 728 | ATCGAGTTCGACTTGGTGGTTATTGTC | 783 |
| DNMT3B | GTAGCCATGAAGGTTGGCGACAAG | 724 | TTTCCCCTGTTTGATCGAGTTCGACTT | 785 |
| DNMT3B | ACATCTCACGGTTCCTGGAG | 710 | AAGAGGTGTCGGATGACAGG | 681 |
| DNMT3B | ACCGGCCGTTCTTCTGGAT | 732 | CCATGTTGGACACGTCTGTG | 703 |
| DNMT3B | AGAGGGACATCTCACGGTTCCTGG | 726 | GCACCACGGCCCATGTTG | 729 |
| DNMT3B | TTTTACCACCTGCTGAATTACTCA | 740 | TTGGACACGTCTGTGTAGTGC | 679 |
| DNMT3B | CGGCTCTTCTTCGAATTTTACCAC | 742 | ACGGCCCATGTTGGACAC | 713 |
| DNMT3B | TACTCACGCCCCAAGGAGGG | 734 | GACACGTCTGTGTAGTGCACAGGA | 797 |
| DNMT3B | CTTCGAATTTTACCACCTGCTGAATTA | 744 | ACAGGCACGCTCCAGGACCT | 725 |
| DNMT3B | GTTGTAGCCATGAAGGTTGGCG | 800 | ACAGGCACGCTCCAGGACCT | 799 |
| DNMT3B | TACTCACGCCCCAAGGAGGG | 734 | GGGCGAAGAGGTGTCGGAT | 707 |
| DNMT3B | CCGTGATAGCATCAAAGAATGA | 804 | TGGCTGGAACTATTCACATGC | 683 |
| DNMT3B | ATAAACTCGAGCTGCAGGACTG | 806 | AAGAGGTGTCGGATGACAGG | 681 |
| DNMT3B | GGACTGCTTGGAATACAATAGGA | 808 | TCAGGAATCACACCTCCTGG | 687 |
| DNMT3B | CATCAAAGAATGATAAACTCGAGC | 810 | CATGCAAAGTAGTCCTTCAGAGG | 685 |
| DNMT3B | CTTGGAATACAATAGGATAGCCAAG | 812 | TATGACCCACACAGCTGAGG | 689 |
| DNMT3B | AGCTGCAGGACTGCTTGGAATA | 814 | TTCAGAGGGGCGAAGAGGTG | 697 |
| DNMT3B | GTGATAGCATCAAAGAATGATAAACTC | 816 | AATCACACCTCCTGGGTCCT | 693 |
| DNMT3B | AGAATGATAAACTCGAGCTGCAGG | 818 | TCCTGGGTCCTGGCTCTG | 741 |
| DNMT3B | AGTTTCTGCTGCTCACAGGG | 680 | CTATTCACATGCAAAGTAGTCCTTCA | 711 |
| DNMT3B | AACCTACCCGGGATGAACAG | 688 | CCATGTTGGACACGTCTGTG | 703 |
| DNMT3B | CGATACTTCTGGGGCAACCTA | 682 | GGGCCTGGCTGGAACTATTC | 715 |
| DNMT3B | CATCAAAGTTTCTGCTGCTCACAG | 686 | ACGGCCCATGTTGGACAC | 713 |
| DNMT3B | TCACAGGGCCCGATACTTCT | 684 | AGGACCTTCCCAGCAGCTTC | 705 |
| DNMT3B | ATTGATGCCATCAAAGTTTCTGC | 692 | ATGACAGGCACGCTCCAG | 701 |
| DNMT3B | TCTGGGGCAACCTACCCGG | 696 | GGGCGAAGAGGTGTCGGAT | 707 |
| DNMT3B | GCGACAAGAGGGACATCTCACG | 834 | AGCTTCTGGCGGGCACCAC | 719 |
| DNMT3B | ACATCTCACGGTTCCTGGAG | 710 | CTGGCTCTGCCACACACC | 837 |
| DNMT3B | CAAGAGGGACATCTCACGGTTCCT | 838 | AAAGTAGTCCTTCAGAGGGGCGAAGAG | 733 |
| DNMT3B | ATGAAGGTTGGCGACAAGAG | 714 | ACACACCCCAGTGGGCTT | 841 |
| FANCA | AACCTGAAGCTGATGCTCTTTC | 842 | TATCCTCATTTCCTGTGCGG | 843 |
| FANCA | TTACCAAGACTGGTTACACCTGG | 844 | TATCCTCATTTCCTGTGCGG | 843 |
| FANCA | AACCTGAAGCTGATGCTCTTTC | 842 | CTGCAATCTGGAAATAATATCCTCA | 846 |
| FANCA | CTGGAGCTGGAAATTCAACC | 847 | GAAATAATATCCTCATTTCCTGTGC | 848 |
| FANCA | AAGACTGGTTACACCTGGAGCTGG | 849 | CATTTCCTGTGCGGCCACC | 850 |
| FANCA | GTTACACCTGGAGCTGGAAATTC | 851 | GCCACCAAAGACCAAATCAG | 852 |
| FANCA | ACCTGGAGCTGGAAATTCAACCTGAAG | 853 | TCCTGTGCGGCCACCAAAGAC | 854 |
| FANCA | ACCCTTGCACCTTCCTTCTG | 855 | TCTGAGTGGTCATAACTCCTTGAG | 856 |
| FANCA | CGAGAGGTGTTGAAAGAGGAAG | 857 | CCAAATCAGAATTTTCTGAGTGG | 858 |
| FANCA | CTCTTTCTGAGGAGGACGTAGC | 859 | AGAATTTTCTGAGTGGTCATAACTCC | 860 |
| FANCA | TGATGCTCTTTCAGATACTGAACG | 861 | GAGAGGCACTATGAGGTCTTGC | 862 |
| FANCA | TGAAGCTGATGCTCTTTCAGATAC | 863 | CAAAGAGGAAGTGCTCCTGG | 864 |
| FANCA | GACACACAGAACCTTCCGAGA | 865 | AGCTCCAGGTCAGCTACCATC | 866 |
| FANCA | CCCTCTCTCTCTGGACACACA | 867 | TATGAGGTCTTGCTGCAGCTC | 868 |
| FANCA | AGGTGTTGAAAGAGGAAGATGTTC | 869 | AAATCTCAAAGAGGAAGTGCTCC | 870 |
| FANCA | AGAACCTTCCGAGAGGTGTTG | 871 | GTGTGGCCGAGAGGCACTAT | 872 |
| FANCA | CTCTCTGGACACACAGAACCTTC | 873 | GTCTTGCTGCAGCTCCAGGT | 874 |
| FANCA | ACCTTCCGAGAGGTGTTGAAAGAG | 875 | AAGGGGTGTGGCCGAGAG | 876 |
| FANCA | CAGACTGGCAGAGAGCTGC | 877 | CTCCTGGGAAGGGGTGTG | 878 |
| FANCA | GAGCTGCCCTCTCTCTCTGG | 879 | AAGTGCTCCTGGGAAGGG | 880 |
| FANCA | ACTGGCAGAGAGCTGCCCTCTC | 881 | GTGGCCGAGAGGCACTATGAGGTC | 882 |
| FANCA | CTTCTGCAGACTGGCAGAGAG | 883 | TGCGGAAAATCTCAAAGAGG | 884 |
| FANCA | TGGAGACCCTTGCACCTTC | 885 | CCGTCTGCGGAAAATCTCAA | 886 |
| FANCA | TTTCCTGGAGACCCTTGCAC | 887 | CTGGAGCCGTCTGCGGAAA | 888 |
| FANCL | CTGTGTTTCTCCGGACTTCG | 889 | ATGGTACTGAAGCAGGTATCCG | 890 |
| FANCL | CCGTGTATGAGGGATTCATCTC | 891 | TTTGCCTTCAACTTGAGAGTGA | 892 |
| FANCL | GGTCGAAAACCGTGTATGAGG | 893 | CAACTTGAGAGTGATTAAATGCTCTC | 894 |
| FANCL | AGAGCTTTTCTGTGTTTCTCCG | 895 | TTAACTTGATGGTACTGAAGCAGG | 896 |
| FANCL | ATGTGCAGGACCCAGCAG | 897 | TGCTCTCTACCAGAAGCATCTTC | 898 |
| FANCL | ACCCAGCAGGTCTAGAGCTTT | 899 | GCAGGTATCCGCATACACAAG | 900 |
| FANCL | GTGACGGAAGCGAGCCTGTT | 901 | GCATCTTCTGCTTTTAACTTGATGG | 902 |
| FANCL | CCTGCTTCTGCCCCAGAAC | 903 | GAGAGTGATTAAATGCTCTCTACCAGA | 904 |
| FANCL | GAGCCTGTTGCGCCAGTG | 905 | TTCTGCTTTTAACTTGATGGTACTGAA | 906 |
| FANCL | GCAGGTCTAGAGCTTTTCTGTGTT | 907 | CTACCAGAAGCATCTTCTGCTTT | 908 |
| FANCL | CCGGACTTCGAGCCATGG | 909 | ACTGAAGCAGGTATCCGCATACA | 910 |
| FANCL | AGGGATTCATCTCGGCTCAG | 911 | GAGGCACAAAATGGAACAGG | 912 |
| FANCL | AGAACCGGTCGAAAACCGT | 913 | AAATAATCTGGTGATTCTGCAGG | 914 |
| FANCL | GCAGGACCCAGCAGGTCTAG | 915 | TGGAACAGGAAAATCCACAAA | 916 |
| FANCL | CATGGCGGTGACGGAAGC | 917 | GAGGTGTCCAGGAGGCACAA | 918 |
| FANCL | CGAAAACCGTGTATGAGGGATTCA | 919 | GGCACAAAATGGAACAGGAAAATC | 920 |
| FANCL | GTGTATGAGGGATTCATCTCGGCTCAG | 921 | TGTCCAGGAGGCACAAAATGGA | 922 |
| FANCL | CAGTGCCCCCTGCTTCTG | 923 | CAGGAAAATCCACAAAATAATCTGG | 924 |
| FANCL | TCTGCCCCAGAACCGGTC | 925 | ATCCACAAAATAATCTGGTGATTCTG | 926 |
| FANCL | TTTCTCCGGACTTCGAGCCA | 927 | GCTGCCAAAAACTGACTATAAATGC | 928 |
| FANCL | GCCCCAGAACCGGTCGAAAA | 929 | GCGTGCTGTTGCACTCCGTG | 930 |
| FANCL | GAAGCGAGCCTGTTGCGCC | 931 | CTGTTGCACTCCGTGGAGGTTT | 932 |
| FANCL | GTTGCGCCAGTGCCCCCT | 933 | GCACTCCGTGGAGGTTTTTCTGG | 934 |
| FANCL | CTTCGAGCCATGGCGGTGAC | 935 | CGTGGAGGTTTTTCTGGCTCAAG | 936 |
| FANCL | CAGCGGACTGCGCATGTG | 937 | ATGCCTTTAGTGATTCTATTGCTGC | 938 |
| FANCL | TCTGCCCCAGAACCGGTC | 925 | CAGGAAAATCCACAAAATAATCTGG | 924 |
| FANCL | CAGTGCCCCCTGCTTCTG | 923 | ATCCACAAAATAATCTGGTGATTCTG | 926 |
| FANCL | CTGTGTTTCTCCGGACTTCG | 889 | CAGCTCTTGTCTATTCTTTAAGGCA | 944 |
| FANCL | AGGGATTCATCTCGGCTCAG | 911 | ATGGTACTGAAGCAGGTATCCG | 890 |
| FANCL | AGAACCGGTCGAAAACCGT | 913 | GCATCTTCTGCTTTTAACTTGATGG | 902 |
| FANCL | CGAAAACCGTGTATGAGGGATTCA | 919 | GAGGTGTCCAGGAGGCACAA | 918 |
| FANCL | GCCCCAGAACCGGTCGAAAA | 929 | GGAGGCACAAAATGGAACAGGA | 952 |
| FANCL | GTGACGGAAGCGAGCCTGTT | 901 | AAAATAATCTGGTGATTCTGCAGGATA | 954 |
| FANCL | CATGGCGGTGACGGAAGC | 917 | GCACAAAATGGAACAGGAAAATCC | 956 |
| FANCL | CATGGCGGTGACGGAAGC | 917 | GGGGAGGAGGAGGTAGTGCATA | 958 |
| FANCL | TTTCTCCGGACTTCGAGCCA | 927 | AATGGAACAGGAAAATCCACAAAA | 960 |
| FANCL | GCAGGACCCAGCAGGTCTAG | 915 | CAATAAGGCTTGAGTAGAACTGGG | 962 |
| FANCL | GAAGCGAGCCTGTTGCGCC | 931 | GGAGGAGGAGGTAGTGCATACAGCTCT | 964 |
| FANCL | CAGCGGACTGCGCATGTG | 937 | GGCTTGAGTAGAACTGGGGAGGAG | 966 |
| FANCL | GTGACGGAAGCGAGCCTGTT | 901 | GGAGGAGGAGGTAGTGCATACAGCTCT | 964 |
| FANCL | GGTCGAAAACCGTGTATGAGG | 969 | TCCCAACCAAGAGTTCCTATCTC | 970 |
| FANCL | AGAGCTTTTCTGTGTTTCTCCG | 895 | AGTTCCTATCTCTTCAATAAGGCTTG | 972 |
| FANCL | CCGTGTATGAGGGATTCATCTC | 891 | CAACCAAGAGTTCCTATCTCTTCAATA | 974 |
| FANCL | AGAACCGGTCGAAAACCGT | 913 | ATCTCTTCAATAAGGCTTGAGTAGAAC | 976 |
| FANCL | ACCCAGCAGGTCTAGAGCTTT | 899 | GGTAGTGCATACAGCTCTTGTCTATTC | 978 |
| FANCL | GCAGGTCTAGAGCTTTTCTGTGTT | 907 | GCAGGTATCCGCATACACAAG | 900 |
| FANCL | CAGTGCCCCCTGCTTCTG | 923 | TTTGCCTTCAACTTGAGAGTGA | 892 |
| FANCL | TTTCTCCGGACTTCGAGCCA | 927 | ACTGAAGCAGGTATCCGCATACA | 910 |
| FANCL | TCTGCCCCAGAACCGGTC | 925 | AGTGATTAAATGCTCTCTACCAGAAGC | 986 |
| FANCL | CGAAAACCGTGTATGAGGGATTCA | 919 | AAATGCTCTCTACCAGAAGCATCTTCT | 988 |
| FANCL | CATGTGCAGGACCCAGCAG | 989 | TTTAACTTGATGGTACTGAAGCAGGTA | 990 |
| FANCL | TCGAGCCATGGCGGTGAC | 991 | TGCCTTCAACTTGAGAGTGATTAAATG | 992 |
| FANCL | GCCCCAGAACCGGTCGAAAA | 929 | GAGGTGTCCAGGAGGCACAA | 918 |
| FANCL | GAAGCGAGCCTGTTGCGCC | 931 | GGAGGCACAAAATGGAACAGGA | 952 |
| FANCL | AGTTGCCTTAAAGAATAGACAAGAGC | 997 | TTTGCCTTCAACTTGAGAGTGA | 892 |
| FANCL | TGTATGAGGGATTCATCTCGG | 999 | AAATAATCTGGTGATTCTGCAGG | 914 |
| FANCL | GTGACGGAAGCGAGCCTGTT | 901 | ATCCACAAAATAATCTGGTGATTTCTG | 926 |
| FANCL | CTGTGTTTCTCCGGACTTCG | 889 | GAGGCACAAAATGGAACAGG | 912 |
| FANCL | GTGGATACCATCGAATAGTACAACAG | 1005 | GAGGCACAAAATGGAACAGG | 912 |
| FANCL | CATGGCGGTGACGGAAGC | 917 | GGCACAAAATGGAACAGGAAAATC | 920 |
| FANCL | TGGCAGCTGAGAACAATACTTAGTG | 1008 | GGCACAAAATGGAACAGGAAAATC | 920 |
| FANCL | GAAGCGAGCCTGTTGCGCC | 931 | TGTCCAGGAGGCACAAAATGGA | 922 |
| FANCL | ATGTAGTTGGCAGCTGAGAACA | 1011 | ATGGAACAGGAAAATCCACAAA | 1012 |
| FANCL | GAACAATACTTAGTGGATACCATCGA | 1013 | GCTGCCAAAAACTGACTATAAATGC | 928 |
| FANCL | GCTTTATGATGGAGTTGAAGATGC | 1015 | ATGCCTTTAGTGATTCTATTGCTGC | 938 |
| FANCL | TTGCCTGAAGATTTACAACTGAAG | 1017 | ATGCCTTTAGTGATTCTATTGCTGC | 938 |
| FANCL | CCTGATCTAATGAGCTTTATGATGG | 1018 | GATTCTATTGCTGCCAAAAACTG | 1019 |
| FANCL | GGATAGTGTTGCCTGAAGATTTACA | 1020 | TCTATTGCTGCCAAAAACTGAC | 1021 |
| FANCL | TCCACCTTAGGATAGTGTTGCC | 1022 | CCCAGAATGCCTTTAGTGATTC | 1023 |
| FANCL | CTAATGAGCTTTATGATGGAGTTGAA | 1024 | CCATAACATCCCAGAATGCC | 1025 |
| FANCL | GAATGCAGCACTCTCCTGATC | 1026 | TCGATTTCATCCATAACATCCC | 1027 |
| FANCL | CACCTTAGGATAGTGTTGCCTGAAGAT | 1028 | TAACATCCCAGAATGCCTTTAGTG | 1029 |
| FANCL | AGCACTCTCCTGATCTAATGAGC | 1030 | GGTCTTCTCATCGATTTCATCC | 1031 |
| FANCL | GAAGAGACTTCCACCTTAGGATAGTG | 1032 | TTTCATCCATAACATCCCAGAATG | 1033 |
| FANCL | ATTATTATGTAGTTGGCAGCTGAGAA | 1034 | TACAGCTCTTGTCTATTCTTTAAGGC | 1035 |
| FANCL | GTGGATACCATCCAATAGTACAACAG | 1005 | TTTGCCTTCAACTTGAGAGTGA | 892 |
| FANCL | TGGCAGCTGAGAACAATACTTAGTG | 1008 | ATGGTACTGAAGCAGGTATCCG | 890 |
| FANCL | GAACAATACTTAGTGGATACCATCGA | 1040 | TGCTCTCTACCAGAAGCATCTTC | 898 |
| FANCL | ATGTAGTTGGCAGCTGAGAACAATACT | 1042 | TTAACTTGATGGTACTGAAGCAGG | 896 |
| FANCL | TCCACCTTAGGATAGTGTTGCC | 1044 | CAACTTGAGAGTGATTAAATGCTCTC | 894 |
| FANCL | TTGCCTGAAGATTTACAACTGAAG | 1017 | GCAGGTATCCGCATACACAAG | 900 |
| FANCL | GGATAGTGTTGCCTGAAGATTTACA | 1020 | AGTGATTAAATGCTCTCTACCAGAAGC | 986 |
| FANCL | TGAAGATTTACAACTGAAGAATGCAAG | 1050 | ACTGAAGCAGGTATCCGCATACA | 910 |
| FANCL | GGTCGAAAACCGTGTATGAGG | 969 | CTACCAGAAGCATCTTCTGCTTT | 908 |
| FANCL | AGAACCGGTCGAAAACCGT | 913 | CAGGAAAATCCACAAAATAATCTGG | 924 |
| FANCL | CCTGCTTCTGCCCCAGAAC | 1056 | ATCCACAAAATAATCTGGTGATTCTG | 926 |
| FANCL | TCTGCCCCAGAACCGGTC | 925 | GGCACAAAATGGAACAGGAAAATC | 920 |
| FANCL | CAGTGCCCCCTGCTTCTG | 923 | ATGGAACAGGAAAATCCACAAA | 1012 |
| FANCL | GCCCCAGAACCGGTCGAAAA | 929 | TGTCCAGGAGGCACAAAATGGA | 922 |
| FANCL | CTGTGTTTCTCCGGACTTCG | 889 | TCCCAACCAAGAGTTCCTATCTC | 970 |
| FANCL | GCAGGTCTAGAGCTTTTCTGTGTT | 907 | ATCTCTTCAATAAGGCTTGAGTAGAAC | 976 |
| FANCL | GAGCCTGTTGCGCCAGTG | 905 | CAACCAAGAGTTCCTATCTCTTCAATA | 974 |
| FANCL | GCAGGACCCAGCAGGTCTAG | 1070 | ATCCACAAAATAATCTGGTGATTCTG | 926 |
| FANCL | TTTCTCCGGACTTCGAGCCA | 927 | TTTACCTGAGGTGTCCAGGAGG | 1073 |
| FANCL | GAGCCTGTTGCGCCAGTG | 905 | GCATCTTCTGCTTTAACTTGATGG | 902 |
| FANCL | GTGACGGAAGCGAGCCTGTT | 901 | TTCTGCTTTTAACTTGATGGTACTGAA | 906 |
| FANCL | AGAACCGGTCGAAAACCGT | 913 | CTACCAGAAGCATCTTCTGCTTT | 908 |
| FANCL | GCCCCAGAACCGGTCGAAAA | 929 | GGCACAAAATGGAACAGGAAAATC | 920 |
| FGFR1 | AGAACTGGGATGTGGAGCTG | 1082 | TGTTTCTTTCTCCTCTGAAGAGG | 1083 |
| FGFR1 | CTCTATGCTTGCGTAACCAGC | 1084 | TGTTTCTTTCTCCTCTGAAGAGG | 1083 |
| FGFR1 | ATGTGCAGAGCATCAACTGG | 1085 | TTTGGTGTTATCTGTTTCTTTCTCC | 1086 |
| FGFR1 | AGGTGGAGGTGCAGGACTC | 1087 | GGTTTGGTTTGGTGTTATCTGTTT | 1088 |
| FGFR1 | GGTGACCTGCTGCAGCTTC | 1089 | CATCATCATCATCATCCTCCG | 1090 |
| FGFR1 | AGCTGGCGGAAAGCAACC | 1091 | TCTGAAGAGGAGTCATCATCATCA | 1092 |
| FGFR1 | GGACGATGTGCAGAGCATC | 1093 | CCGAGGAGGGGAGAGCAT | 1094 |
| FGFR1 | AGAGCATCAACTGGCTGCG | 1095 | CATCATCATCCTCCGAGGAG | 1096 |
| FGFR1 | TGACACCACCTACTTCTCCGTC | 1097 | GAACTTCACTGTCTTGGCAGC | 1098 |
| FGFR1 | CCTACTTCTCCGTCAATGTTTCAG | 1099 | CACTGGAAGGGCATTTGAAC | 1100 |
| FGFR1 | ATCACAGGGGAGGAGGTGG | 1101 | GGATGTCCAATATGGAGCTACG | 1102 |
| FGFR1 | GGGCAGTGACACCACCTACT | 1103 | TCTTTTCCATCTTTTCTGGGG | 1104 |
| FGFR1 | TTGCGTAACCAGCAGCCC | 1105 | GCATTTGAACTTCACTGTCTTGG | 1106 |
| FGFR1 | CCGGCCTCTATGCTTGCGTA | 1107 | TCCATCTTTTCTGGGGATGTCC | 1108 |
| FGFR1 | AGGTGCAGGACTCCGTGC | 1109 | GCATGCAATTCTTTTCCATC | 1110 |
| FGFR1 | ACCGCACCCGCATCACAG | 1111 | CGGCACTGCATGCAATTCT | 1112 |
| FGFR1 | TAACCAGCAGCCCCTCGG | 1113 | TTTCAACCAGCGCAGTGTG | 1114 |
| FGFR1 | CCCTCGGGCAGTGACACCAC | 1115 | ACTGGAAGGGCATTTGAACTTCACTG | 1116 |
| FGFR1 | GAAAGCAACCGCACCCGCAT | 1117 | CTTTTCTGGGGATGTCCAATATGGAGC | 1118 |
| FGFR1 | CCCGCAGACTCCGGCCTCTA | 1119 | GGGTCCCACTGGAAGGGCAT | 1120 |
| FGFR1 | AGCAGCCCCTCGGGCAGT | 1121 | GCAGTGTGGGGTTTGGGGTC | 1122 |
| FGFR1 | ACCCGCATCACAGGGGAG | 1123 | TCTTGGCAGCCGGCACTG | 1124 |
| FGFR1 | CAGGACTCCGTGCCCGCAG | 1125 | GGGTTTGGGGTCCCACTGG | 1126 |
| FGFR1 | GGTGCAGCTGGCGGAAAG | 1127 | ACCAGCGCAGTGTGGGGTTT | 1128 |
| FGFR1 | CCGACCTTGCCTGAACAAG | 1129 | CATCATCATCATCATCCTCCG | 1090 |
| FGFR1 | AGAACTGGGATGTGGAGCTG | 1082 | CCGAGGAGGGGAGAGCAT | 1094 |
| FGFR1 | GTCACAGCCACACTCTGCAC | 1133 | CATCATCATCCTCCGAGGAG | 1096 |
| FGFR1 | ACACTCTGCACCGCTAGGC | 1135 | TCTGAAGAGGAGTCATCATCATCA | 1092 |
| FGFR1 | CTGTGCTGGTCACAGCCAC | 1137 | TGTTTCTTTCTCCTCTGAAGAGG | 1083 |
| FGFR1 | GAAGTGCCTCCTCTTCTGGG | 1139 | GGTTTGGTTTGGTGTTATCTGTTT | 1088 |
| FGFR1 | GCCTCCTCTTCTGGGCTGTG | 1141 | GCATACGGTTTGGTTTGGTG | 1142 |
| FGFR1 | TAGGCCGTCCCCGACCTTG | 1143 | TTTCTGGGGATGTCCAATATGG | 1144 |
| FGFR1 | CGTCCCCGACCTTGCCTGAA | 1145 | CTGGGGATGTCCAATATGGAGCTACG | 1146 |
| FGFR1 | GTCACAGCCACACTCTGCAC | 1133 | ACCAAGTCCAAATGGCAAGG | 1148 |
| FGFR1 | AGAACTGGGATGTGGAGCTG | 1082 | ACTTAGCCTCCTGGAGATCTGG | 1150 |
| FGFR1 | GAAGTGCCTCCTCTTCTGGG | 1139 | AAATGGCAAGGGAGTGATGG | 1152 |
| FGFR1 | ACACTCTGCACCGCTAGGC | 1135 | CCGAGTACCAAGTCCAAATGG | 1154 |
| FGFR1 | CCGACCTTGCCTGAACAAG | 1129 | CAGGGATACCACCACCTGTT | 1156 |
| FGFR1 | CTGTGCTGGTCACAGCCAC | 1137 | CACTAAGCCGAGTACCAAGTCC | 1158 |
| FGFR1 | GCCTCCTCTTCTGGGCTGTG | 1141 | CAAGGGAGTGATGGAGTGGAAG | 1160 |
| FGFR1 | CTAACTGCAGAACTGGGATGTG | 1161 | GAGCACCACTTAGCCTCCTG | 1162 |
| FGFR1 | ATGTGGAGCTGGAAGTGCCT | 1163 | GAGTGGAAGCTGGCCGAG | 1164 |
| FGFR1 | TCTTCTGGGCTGTGCTGGTC | 1165 | GTGATGGAGTGGAAGCTGGC | 1166 |
| FGFR1 | TTGTCACCAACCTCTAACTGCA | 1167 | TCCTGGAGATCTGGGCAAG | 1168 |
| FGFR1 | AGCTGGAAGTGCCTCCTCTT | 1169 | CTGGCCGAGCACCACTTAG | 1170 |
| FGFR1 | CGTCCCCGACCTTGCCTGAA | 1145 | CCACCACCTGTTCAGGGCCTCTA | 1172 |
| FGFR1 | TAGGCCGTCCCCGACCTTG | 1143 | CCTCTCCAGCAGAGCAGGGATA | 1174 |
| FGFR1 | ACAGCCACACTCTGCACCGCTAG | 1175 | GAGTACCAAGTCCAAATGGCAAGGGAG | 1176 |
| FGFR1 | GTGCTGGTCACAGCCACACTCTG | 1177 | CACCTGTTCAGGGCCTCTAATCACTA | 1178 |
| FGFR1 | CTGCACCGCTAGGCCGTCC | 1179 | CAGGGCCTCTAATCACTAAGCCGA | 1180 |
| FGFR1 | TCACCAACCTCTAACTGCAGAACTGG | 1181 | GGAAGCTGGCCGAGCACCAC | 1182 |
| FGFR1 | AGATGTGGAGCCTTGTCACC | 1183 | CTCTAATCACTAAGCCGAGTACCAA | 1184 |
| FGFR1 | AGATGTGGAGCCTTGTCACC | 1183 | TTTGGTGTTATCTGTTTCTTTCTCC | 1086 |
| FGFR1 | ATGTGGAGCTGGAAGTGCCT | 1163 | TCTGAAGAGGAGTCATCATCATCA | 1092 |
| FGFR1 | CTAACTGCAGAACTGGGATGTG | 1161 | CATCATCATCCTCCGAGGAG | 1096 |
| FGFR1 | GTCACAGCCACACTCTGCAC | 1133 | CACTGGAAGGGCATTTGAAC | 1100 |
| FGFR1 | CCGACCTTGCCTGAACAAG | 1129 | GGATGTCCAATATGGAGCTACG | 1102 |
| FGFR1 | ACACTCTGCACCGCTAGGC | 1135 | GAACTTCACTGTCTTGGCAGC | 1098 |
| FGFR1 | GCCTCCTCTTCTGGGCTGTG | 1141 | CGGCACTGCATGCAATTTCT | 1112 |
| FGFR1 | GTGCTGGTCACAGCCACACTCTG | 1177 | ACTGGAAGGGCATTTGAACTTCACTG | 1116 |
| FGFR1 | ACAGCCACACTCTGCACCGCTAG | 1175 | GGGTCCCACTGGAAGGGCAT | 1120 |
| FGFR1 | CTGCACCGCTAGGCCGTCC | 1179 | GCAGTGTGGGGTTTGGGGTC | 1204 |
| FGFR1 | GAGCCTTGTCACCAACCTCT | 1205 | TCTTTTCCATCTTTTCTGGGG | 1104 |
| FGFR1 | TCACCAACCTCTAACTGCAGAACTGG | 1181 | TCCATCTTTTCTGGGGATGTCC | 1108 |
| FGFR1 | CGTCCCCGACCTTGCCTGAA | 1145 | TCTTGGCAGCCGGCACTG | 1124 |
| FGFR1 | TAGGCCGTCCCCGACCTTG | 1143 | ACCAGCGCAGTGTGGGGTTT | 1128 |
| FGFR1 | CATGGAGATGTGGAGCCTTG | 1213 | TTTCTGGGGATGTCCAATATGG | 1144 |
| FGFR1 | AGTATCCATGGAGATGTGGAGC | 1215 | GCATTTGAACTTCACTGTCTTGG | 1106 |
| FGFR1 | AGGATCGAGCTCACTGTGGA | 1217 | CTGCATGCAATTTCTTTTCCA | 1218 |
| FGFR1 | GTGGAGCCTTGTCACCAACCTCTAACT | 1219 | TTGCCATTTTTCAACCAGCG | 1220 |
| FGFR1 | TCGAGCTCACTGTGGAGTATCC | 1221 | GCATACGGTTTGGTTTGGTG | 1142 |
| FGFR1 | CCGACCTTGCCTGAACAAG | 1129 | TTTGGTGTTATCTGTTTCTTTCTCC | 1086 |
| FGFR1 | CTGTGCTGGTCACAGCCAC | 1137 | TCTGAAGAGGAGTCATCATCATCA | 1092 |
| FGFR1 | CTAACTGCAGAACTGGGATGTG | 1161 | GGATGTCCAATATGGAGCTACG | 1102 |
| FGFR1 | AGATGTGGAGCCTTGTCACC | 1183 | GCATACGGTTTGGTTTGGTG | 1142 |
| FGFR1 | AGAACTGGGATGTGGAGCTG | 1082 | TGCTGGTTACGCAAGCATAG | 1232 |
| FGFR1 | TTGTCACCAACCTCTAACTGCA | 1167 | TTGATGCTCTGCACATCGTC | 1234 |
| FGFR1 | GTCACAGCCACACTCTGCAC | 1133 | ACATTGACGGAGAAGTAGGTGG | 1236 |
| FGFR1 | ATGTGGAGCTGGAAGTGCCT | 1163 | AAGCATAGAGGCCGGAGTCT | 1238 |
| FGFR1 | AGATGTGGAGCCTTGTCACC | 1183 | GCAGCCAGTTGATGCTCTG | 1240 |
| FGFR1 | GAGCCTTGTCACCAACCTCT | 1205 | AGTCCTGCACCTCCACCTC | 1242 |
| FGFR1 | CCGACCTTGCCTGAACAAG | 1129 | AGAAGTAGGTGGTGTCACTGCC | 1244 |
| FGFR1 | AGGATCGAGCTCACTGTGGA | 1217 | GACCAGGAAGGACTCCACTTC | 1246 |
| FGFR1 | CTAACTGCAGAACTGGGATGTG | 1161 | TACGCAAGCATAGAGGCCG | 1248 |
| FGFR1 | AGTATCCATGGAGATGTGGAGC | 1215 | GTTGCTTTCCGCCAGCTG | 1250 |
| FGFR1 | GAAGTGCCTCCTCTTCTGGG | 1139 | TCCACCTCCTCCCCTGTGAT | 1252 |
| FGFR1 | TCTTCTGGGCTGTGCTGGTC | 1165 | CGAGGGGCTGCTGGTTAC | 1254 |
| FGFR1 | TCGAGCTCACTGTGGAGTATCC | 1221 | AAGCTGCAGCAGGTCACC | 1256 |
| FGFR1 | ACACTCTGCACCGCTAGGC | 1135 | GCACCTCCACCTCCTCCC | 1258 |
| FGFR1 | AGCTGGAAGTGCCTCCTCTT | 1169 | ACAGCGAAGCTGCAGCAG | 1260 |
| FGFR1 | GCCTCCTCTTCTGGGCTGTG | 1141 | CGGGTGCGGTTGCTTTCC | 1262 |
| FGFR1 | TCACCAACCTCTAACTGCACAACTGG | 1181 | GGAAGGACTCCACTTCCACAGG | 1264 |
| FGFR1 | ACAGCCACACTCTGCACCGCTAG | 1175 | TCTGCACATCGTCCCGCAG | 1266 |
| FGFR1 | CTGTGCTGGTCACAGCCAC | 1137 | TGGTGTCACTGCCCGAGG | 1268 |
| FGFR1 | GTGCTGGTCACAGCCACACTCTG | 1177 | AGCCAGTTGATGCTCTGCACATC | 1270 |
| FGFR1 | GTGGAGCCTTGTCACCAACCTCTAACT | 1219 | CGTCCCGCAGCCAGTTGAT | 1272 |
| FGFR1 | CGTCCCCGACCTTGCCTGAA | 1145 | TCCTCCCCTGTGATGCGGGT | 1274 |
| FGFR1 | CTGCACCGCTAGGCCGTCC | 1179 | GAGTCTGCGGGCACGGAGTC | 1276 |
| FGFR1 | CAGTTTGAAAAGGAGGATCGAG | 1277 | GGGTGGACCAGGAAGGACTC | 1278 |
| FGFR1 | TAGGCCGTCCCCGACCTTG | 1143 | CTTTCCGCCAGCTGCACCC | 1280 |
| FGFR1 | AAAAGGAGGATCGAGCTCACTG | 1281 | CAGCCGACAGCGAAGCTG | 1282 |
| FGFR1 | CTGTGGAGTATCCATGGAGATG | 1283 | CACGGAGTCCTGCACCTC | 1284 |
| FGFR1 | CCATGGAGATGTGGAGCCTTGTC | 1285 | ATCGTCCCGCAGCCGACAG | 1286 |
| FGFR1 | AGGAGGATCGAGCTCACTGTGGAGTAT | 1287 | AGGTCACCGGGGTGGACCAG | 1288 |
| FGFR1 | GAGCTCACTGTGGAGTATCCATGGAGA | 1289 | CCAGCTGCACCCCGTCCC | 1290 |
| FGFR1 | CCAGGACCCGAACAGAGC | 1291 | CTCCACTTCCACAGGGGCTC | 1292 |
| FGFR1 | AGGCGGAACCTCCACGCC | 1293 | TGCAGCAGGTCACCGGGGT | 1294 |
| FGFR1 | ACACGCCCGCTCGCACAA | 1295 | CTTCCACAGGGGCTCCCCAG | 1296 |
| FGFR1 | GGACTCTCCCGAGGCGGAAC | 1297 | AGGGGCTCCCCAGGGCTG | 1298 |
| FGFR1 | AACCTCCACGCCGAGCGAG | 1299 | TAGAGGCCGGAGTCTGCGGG | 1300 |
| FGFR1 | CTGCACCGCTAGGCCGTCC | 1179 | CCATCTTTTCTGGGGATGTCCAA | 1302 |
| FGFR2 | TGCAGATGGGATTAACGTCC | 1303 | GTGTCATCCTCATCATCTCCG | 1304 |
| FGFR2 | TTTCATCTGCCTGGTCGTG | 1305 | GTGTCATCCTCATCATCTCCG | 1304 |
| FGFR2 | TCACCATGGCAACCTTGTC | 1307 | ACAAAATCTTCCGCACCATC | 1308 |
| FGFR2 | GGCCCTCCTTCAGTTTAGTTG | 1309 | TCTTGTTGTTACTGTTCTCACTGACA | 1310 |
| FGFR2 | TGCAGATGGGATTAACGTCC | 1303 | ATCTCCGGATGAGATGGCAT | 1312 |
| FGFR2 | GGGTCGTTTCATCTGCCTG | 1313 | ACCATCGGTGTCATCCTCAT | 1314 |
| FGFR2 | GATTGGTACCGTAACCATGGTC | 1315 | CTCATCATCTCCGGATGAGATG | 1316 |
| FGFR2 | TGGTCGTGGTCACCATGG | 1317 | CTCACTGACAAAATCTTCCGC | 1318 |
| FGFR2 | ATCTGCCTGGTCGTGGTCAC | 1319 | ATCTTCCGCACCATCGGTGT | 1320 |
| FGFR2 | ATGGCAACCTTGTCCCTGG | 1321 | TTACTGTTCTCACTGACAAAATCTTCC | 1322 |
| FGFR2 | TGAGGATACCACATTAGAGCCAG | 1323 | TTTCTGTGTTGGTCCAGTATGG | 1324 |
| FGFR2 | CCTTCAGTGTAGTTGAGGATACCAC | 1325 | GTTGGTCCAGTATGGTGCTC | 1326 |
| FGFR2 | GTTTAGTTGAGGATACCACATTAGAGC | 1327 | CCGCTTTTCCATCTTTTCTG | 1328 |
| FGFR2 | TCGTGGTCACCATGGCAACC | 1329 | TCCATCTTTTCTGTGTTGGTCCAGTAT | 1330 |
| FGFR2 | ACCTTGTCCCTGGCCCGG | 1331 | CATGGAGCCGCTTTTCCATC | 1332 |
| FGFR4 | GAAGCACATCGTCATCAACG | 1333 | AAGTGGGAGACTTGGTTCTGC | 1334 |
| FGFR4 | ATCAATAGCTCAGAGGTGGAGG | 1335 | AAGTGGGAGACTTGGTTCTGC | 1334 |
| FGFR4 | CTGTACCTGCGGAACGTGTC | 1336 | GAGAACTGCAAAGTGGGAGACT | 1337 |
| FGFR4 | GAGGTGGAGGTCCTGTACCTG | 1338 | AGGCTGTCACATGTGAGGTG | 1339 |
| FGFR4 | AATTCCATCGGCCTCTCCTA | 1340 | TCCAGGGAGAACTGCAAAGT | 1341 |
| FGFR4 | AGGCGAGTACACCTGCCTC | 1342 | AGACTTGGTTCTGCCTGCTG | 1343 |
| FGFR4 | ACTGCAGACATCAATAGCTCAGAG | 1344 | TGGAGTCAGGCTGTCACATG | 1345 |
| FGFR4 | GCTCAGAGGTGGAGGTCCTG | 1346 | ACTGCAAAGTGGGAGACTTGGTTC | 1347 |
| FGFR4 | AGGTCCTGTACCTGCGGAAC | 1348 | ACATGTGAGGTGGGGGATG | 1349 |
| FGFR4 | GAACGTGTCAGCCGAGGAC | 1350 | GTTCTGCCTGCTGGAGTCAG | 1351 |
| FGFR4 | AATAGCTCAGAGGTGGAGGTCCTGTAC | 1352 | CCTGCTGGAGTCAGGCTGTC | 1353 |
| FGFR4 | CTGCGGAACGTGTCAGCCG | 1354 | GTGGGGGATGCGCCCAGTAC | 1355 |
| GATA3 | CTTCGGATGCAAGTCCAGG | 1356 | AAGTCCTCCAGTGAGTCATGC | 1357 |
| GATA3 | CTTCGGATGCAAGTCCAGG | 1356 | TTGTGAAGCTTGTAGTAGAGCCC | 1358 |
| GATA3 | AGCATGAAGCTGGAGTCGTC | 1359 | TGTGGTGGTCTGACAGTTCG | 1360 |
| GATA3 | CTACGTGCCCGAGTACAGCT | 1361 | TCCAGAGTGTGGTTGTGGTG | 1362 |
| GATA3 | ATCACCACCTACCCGCCCTA | 1363 | ATTGGCATTCCTCCTCCAGA | 1364 |
| GATA3 | AGTACAGCTCCGGACTCTTCC | 1365 | GTGTGGTTGTGGTGGTCTGA | 1366 |
| GATA3 | ACCACCCCATCACCACCTAC | 1367 | TAGTAGAGCCCACAGGCATTG | 1368 |
| GATA3 | AAGCTGGAGTCGTCCCACTC | 1369 | TCTGACAGTTCGCACAGGAC | 1370 |
| GATA3 | CTCCTCGTCGACCCACCAC | 1371 | CACAGGCATTGCAGACAGG | 1372 |
| GATA3 | CTCCCGTGGCAGCATGAC | 1373 | ATTCCTCCTCCAGAGTGTGGTT | 1374 |
| GATA3 | AAAGAGTGCCTCAAGTACCAGG | 1375 | TGCTCTCCTGGCTGCAGA | 1376 |
| GATA3 | ACCTACCCGCCCTACGTGC | 1377 | GACGTCCCTGCTCTCCTGG | 1378 |
| GATA3 | CCGACAGCATGAAGCTGGAG | 1379 | AGTTCGCACAGGACGTCCCT | 1380 |
| GATA3 | GATGCAAGTCCAGGCCCAAG | 1381 | AGCTTGTAGTAGAGCCCACAGGC | 1382 |
| GATA3 | GACCCACCACCCCATCAC | 1383 | GTCCCCATTGGCATTCCTC | 1384 |
| GATA3 | ACCGGCTTCGGATGCAAGTC | 1385 | TGCAGACAGGGTCCCCATTG | 1386 |
| GATA3 | GCCCGAGTACAGCTCCGGAC | 1387 | AGTGTGGTTGTGGTGGTCTGACAGTTC | 1388 |
| GATA3 | TGGAGCCTCCTCGTCGAC | 1389 | CACAGGACGTCCCTGCTCTC | 1390 |
| GATA3 | CCGCCCTACGTGCCCGAGTA | 1391 | GGCATTGCAGACAGGGTCCC | 1392 |
| GATA3 | AGCATGACCGCCCTGGGT | 1393 | ACAGGGTCCCCATTGGCATT | 1394 |
| GATA3 | AAGGCCCGGTCCAGCACAG | 1395 | GGCCGGGTTAAACGAGCTGTT | 1396 |
| GATA3 | CCTGGGTGGAGCCTCCTC | 1397 | TGCCTTCCTTCTTTCATAGTCAGG | 1398 |
| GATA3 | CCCCCACCGGCTTCGGAT | 1399 | CGGGTTAAACGAGCTGTTCTTGGG | 1400 |
| GATA3 | AGTCGTCCCACTCCCGTGG | 1401 | TCCTTCTTCATAGTCAGGGGTCTG | 1402 |
| GATA3 | AAAGAGTGCCTCAAGTACCAGG | 1375 | CTTCGCTTGGGCTTAATGAG | 1404 |
| GATA3 | AGCATGAAGCTGGAGTCGTC | 1359 | AGGCGTTGCACAGGTAGTGT | 1406 |
| GATA3 | ATCACCACCTACCCGCCCTA | 1363 | CACAGTTCACACACTCCCTGC | 1408 |
| GATA3 | CTTCGGATGCAAGTCCAGG | 1356 | CCGGTTCTGTCCGTTCATTT | 1410 |
| GATA3 | AGTACAGCTCCGGACTCTTCC | 1365 | CCGTTCATTTTGTGATAGAGGC | 1412 |
| GATA3 | ACCACCCCATCACCACCTAC | 1367 | TAGTGTCCCGTGCCATCTC | 1414 |
| GATA3 | AAGCTGGAGTCGTCCCACTC | 1369 | TTGCACAGGTAGTGTCCCGT | 1416 |
| GATA3 | CTACGTGCCCGAGTACAGCT | 1361 | GAGGTTGCCCCACAGTTCAC | 1418 |
| GATA3 | CTCCTCGTCGACCCACCAC | 1371 | TGCCCCACAGTTCACACACT | 1420 |
| GATA3 | CCGACAGCATGAAGCTGGAG | 1379 | CTTAATGAGGGGCCGGTTCT | 1422 |
| GATA3 | ACCTACCCGCCCTACGTGC | 1377 | CATCTCGCCGCCACAGTG | 1424 |
| GATA3 | TGGAGCCTCCTCGTCGAC | 1389 | TTTGTGATAGAGCCCGCAG | 1426 |
| GATA3 | GACCCACCACCCCATCAC | 1383 | GTTCTGTCCGTTCATTTTGTGAT | 1428 |
| GATA3 | CTCCCGTGGCAGCATGAC | 1373 | ACAGTGGGGTCGAGGTTGC | 1430 |
| GATA3 | ACCGGCTTCGGATGCAAGTC | 1385 | CTTGGGCTTAATGAGGGGCC | 1432 |
| GATA3 | GCCCGAGTACAGCTCCGGAC | 1387 | GGGTCGAGGTTGCCCCACAG | 1434 |
| GATA3 | AGTCGTCCCACTCCCGTGG | 1401 | CACAGGTAGTGTCCCGTGCCATC | 1436 |
| GATA3 | GATGCAAGTCCAGGCCCAAG | 1381 | GATAGAGCCCGCAGGCGTTG | 1438 |
| GATA3 | CCGCCCTACGTGCCCGAGTA | 1391 | AGGGGCCGGTTCTGTCCGTT | 1440 |
| GATA3 | AGCATGACCGCCCTGGGT | 1393 | CCCGCAGGCGTTGCACAG | 1442 |
| GATA3 | CCCGGCAGGACGAGAAAGAG | 1443 | CCGCCACAGTGGGGTCGAG | 1444 |
| GATA3 | CCTGGGTGGAGCCTCCTC | 1397 | TCCAGAGTGTGGTTGTGGTG | 1362 |
| GATA3 | AAGGCCCGGTCCAGCACAG | 1395 | ACAGGGTCCCCATTGGCATT | 1394 |
| GATA3 | GACGAGAAAGAGTGCCTCAAGT | 1449 | TGCTCTCCTGGCTGCAGA | 1376 |
| GATA3 | CCTCAAGTACCAGGTGCCC | 1451 | CACAGGACGTCCCTGCTCTC | 1390 |
| GATA3 | CCCCCACCGGCTTCGGAT | 1399 | GAGCCCACAGGCATTGCAGA | 1454 |
| GATA3 | CCTGCCCGACAGCATGAAG | 1455 | CTGACAGTTCGCACAGGACG | 1456 |
| GATA3 | GTGGCAGCATGACCGCCCT | 1457 | GACGTCCCTGCTCTCCTGGC | 1458 |
| GATA3 | GACCGCCCTGGGTGGAGC | 1459 | CCCCATTGGCATTCCTCCTC | 1460 |
| GATA3 | GTGCCCCTGCCCGACAGC | 1461 | CAGTTCGCACAGGACGTCCCTG | 1462 |
| GATA3 | GGACCCATCGCTGTCCAC | 1463 | TGTGGTGGTCTGACAGTTCG | 1360 |
| GATA3 | TGTCCACCCCAGGCTCGG | 1465 | GGTGGTCTGACAGTTCGCACAGG | 1466 |
| GATA3 | ATCGCTGTCCACCCCAGG | 1467 | GTGTGGTTGTGGTGGTCTGA | 1366 |
| GNB3 | AGGTCCAGCCAGAGCCCAA | 1469 | ACTCGTCCCACCACCTCTAG | 1470 |
| GNB3 | AGAGTGACCCCTCGACCTGT | 1471 | TGCCAGAGTAACGTCAGCAC | 1472 |
| GNB3 | GAGCCAGAGTGACCCCTCG | 1473 | AGAGTAACGTCAGCACAGGCTT | 1474 |
| GNB3 | CCCTCGACCTGTCAGCCATG | 1475 | TAACGTCAGCACAGGCTTTCCTGG | 1476 |
| GNB3 | AGATGGAGCAACTGCGTCAG | 1477 | ACTCGTCCCACCACCTCTAG | 1470 |
| GNB3 | CAGCTCAAGAAGCAGATTGC | 1479 | GTGCATGGCGTAAATCTTGG | 1480 |
| GNB3 | TCAGGAAGCGGAGCAGCT | 1481 | TAAATCTTGGCCAGGTGTCC | 1482 |
| GNB3 | CAACTGCGTCAGGAAGCG | 1483 | CAGGTGTCCCCTTAACGTCC | 1484 |
| GNB3 | ATGGGGGAGATGGAGCAACT | 1485 | GTCCGCATCTGGACTCGTC | 1486 |
| GNB3 | AAGCGGAGCAGCTCAAGAAG | 1487 | TAGAATCAGTGGCCCAGTGC | 1488 |
| GNB3 | TCAGCCATGGGGGAGATG | 1489 | ACCACCTCTAGGCCAGACACC | 1490 |
| GNB3 | GCGGAGCAGCTCAAGAAGCAGATT | 1491 | GGCCCAGTGCATGGCGTAAAT | 1492 |
| GNB3 | CTGCGTCAGGAAGCGGAGCA | 1493 | TCTTGGCCAGGTGTCCCCTTAA | 1494 |
| GNB3 | ACCTGTCAGCCATGGGGGAG | 1495 | GCATCTGGACTCGTCCCACC | 1496 |
| GNB3 | AGGTCCAGCCAGAGCCCAA | 1469 | ATCTGGACTCGTCCCACCACCTCT | 1498 |
| GNB3 | ACCGGAGCTGGAAACCCG | 1499 | CTTAACGTCCGCCGCGTCC | 1500 |
| GNB3 | CAGGAACCGGAGCTGGAAAC | 1501 | TGGCGTAAATCTTGGCCAGG | 1502 |
| HMGA1 | CCCAGCCATCACTCTTCC | 1503 | GAGATGCCCTCCTCTTCCTC | 1504 |
| HMGA1 | CCCAGCCATCACTCTTCC | 1503 | TTTGCTTCCCTTTGGTCG | 1505 |
| HMGA1 | AAGGGAAGATGAGTGAGTCGAG | 1506 | CTCTTAGGTGTTGGCACTTCG | 1507 |
| HMGA1 | TCTTCCACCTGCTCCTTAGAGA | 1508 | ACCCTTGTTTTTGCTTCCCT | 1509 |
| HMGA1 | CCATCACTCTTCCACCTGCT | 1510 | CCCGAGGTCTCTTAGGTGTTG | 1511 |
| HMGA1 | AGTGAGTCGAGCTCGAAGTCC | 1512 | CTTGTTTTTGCTTCCCTTTGGTC | 1513 |
| HMGA1 | AAGATGAGTGAGTCGAGCTCGAA | 1514 | GTGTTGGCACTTCGCTGGG | 1515 |
| HMGA1 | CACCTGCTCCTTAGAGAAGGGAA | 1516 | GTCGGCCCCGAGGTCTCTTA | 1517 |
| HMGA1 | CTCGAAGTCCAGCCAGCCCTT | 1518 | CCGAGGTCTCTTAGGTGTTGGCACTTC | 1519 |
| HMGA1 | ATCCCAGCCATCACTCTTCCACCT | 1520 | CTTTGGTCGGCCCCGAGGT | 1521 |
| HMGA1 | TGGCCTCCAAGCAGGAAA | 1522 | GAGATGCCCTCCTCTTCCTC | 1504 |
| HMGA1 | TCCTTAGAGAAGGGAAGATGAGTG | 1524 | TGTCCAGTCCCAGAAGGAAG | 1525 |
| HMGA1 | AAAGGACGGCACTGAGAAGC | 1526 | GAGGACTCCTGCGAGATGC | 1527 |
| HMGA1 | TCCAAGCAGGAAAAGGACG | 1528 | GAGCGGAGCAAAGCTGTC | 1529 |
| HMGA1 | CAGCCCTTGGCCTCCAAG | 1530 | ATGGGTCACTGCTCCTCCTC | 1531 |
| HMGA1 | CAGGAAAAGGACGGCACTGA | 1532 | GTCCCAGAAGGAAGCTGCTC | 1533 |
| HMGA1 | TCCAGCCAGCCCTTGGCCT | 1534 | TCCTGCGAGATGCCCTCCTC | 1535 |
| HMGA1 | GGCACTGAGAAGCGGGGC | 1536 | AGTGAGGAGCAGGCGGCAC | 1537 |
| HMGA1 | CTGGCGCGGCTCCAAGAAG | 1538 | CCTCCGAGGACTCCTGCGAG | 1539 |
| HMGA1 | TCTAATTGGGACTCCGAGCC | 1540 | TCTTGGCAGCACCCTTGTTT | 1541 |
| HMGA1 | GCTATTTCTGGCGCTGGC | 1542 | GCAGCACCCTTGTTTTTGCT | 1543 |
| HMGA1 | CCGGGGCTATTTCTGGCGCT | 1544 | CCGGGTCTTGGCAGCACC | 1545 |
| HMGA1 | GTCCTCAGCGCCCAGCAC | 1546 | TCACTGCTCCTCCTCCGAGG | 1547 |
| HMGA1 | ATCCGCATTTGCTACCAGC | 1548 | CTCCTCCTCCGAGGACTCCT | 1549 |
| HMGA1 | AGCCAGGCCGGTCCTCAG | 1550 | CACGCATGGGTCACTGCTC | 1551 |
| HMGA1 | CATTTGCTACCAGCGGCGG | 1552 | GAGCAGGCGGCACGCATG | 1553 |
| HMGA1 | GCTCCTCTAATTGGGACTCC | 1554 | TCCTGGAGTTGTGGTGGTTT | 1555 |
| HMGA1 | ACTCCGAGCCGGGGCTATTT | 1556 | TCTGCCCCTTGGTTTCCTTC | 1557 |
| HMGA1 | TTTTAAGCTCCCCTGAGCC | 1558 | TTTCCTTCCTGGAGTTGTGG | 1559 |
| HMGA1 | CTCCCCTGAGCCGGTGCTG | 1560 | GTTTCCTTCCTGGAGTTGTGGTGGTTT | 1561 |
| HMGA1 | GTGCTGCGCTCCTCTAATTG | 1562 | CCTTGGTTTCCTTCCTGGAG | 1563 |
| HMGA1 | AGCCGGTGCTGCGCTCCT | 1564 | TTTGGGTCTGCCCCTTGGTT | 1565 |
| HMGA1 | TGGGTCGCTCTTTTTAAGCTC | 1566 | TCCTCCAGTGAGGAGCAGG | 1567 |
| HMGA1 | GCTCTTTTTAAGCTCCCCTG | 1568 | AGCTGCTCCTCCAGTGAGG | 1569 |
| HMGA1 | GCCCCTGGGTCGCTCTTTT | 1570 | CAGAAGGAAGCTGCTCCTCCAG | 1571 |
| HMGA1 | TCCAGCCAGCCCTTGGCCT | 1534 | CTTCCCTTTGGTCGGCCCC | 1573 |
| HMGA1 | TCGAGCTCGAAGTCCAGCCA | 1574 | CACGCATGGGTCACTGCTC | 1551 |
| HMGA1 | AGCCCTTGGCCTCCAAGCAG | 1576 | TCCTGCGAGATGCCCTCCTC | 1535 |
| HMGA1 | CTGGCGCGGCTCCAAGAAG | 1538 | TGCTCCTCCTCCGAGGACTC | 1579 |
| HMGA1 | GTGCTGCGCTCCTCTAATTG | 1562 | GCAGCACCCTTGTTTTTGCT | 1543 |
| HMGA1 | AGCCAGGCCGGTCCTCAG | 1550 | GGTCACTGCTCCTCCTCCG | 1583 |
| HMGA1 | ACTCCGAGCCGGGGCTATTT | 1556 | CCGGGTCTTGGCAGCACC | 1585 |
| HMGA1 | GTCCTCAGCGCCCAGCAC | 1546 | CAGAAGGAAGCTGCTCCTCCAG | 1571 |
| HMGA1 | GCCGGGGCTATTTCTGGC | 1588 | TCCTCCAGTGAGGAGCAGG | 1567 |
| HMGA1 | TGGGTCGCTCTTTTTAAGCTC | 1566 | CCTTGGTTTCCTTCCTGGAG | 1563 |
| HMGA1 | GCCCCTGGGTCGCTCTTTT | 1570 | TCTGCCCCTTGGTTTCCTTC | 1557 |
| HMGA1 | GCTCTTTTTAAGCTCCCCTG | 1568 | AAGCTGCTCCTCCAGTGAGG | 1595 |
| HMGA1 | CCATCACTCTTCCACCTGCT | 1510 | ATGGGTCACTGCTCCTCCTC | 1531 |
| HMGA1 | TCTTCCACCTGCTCCTTAGAGA | 1508 | AAGCTGCTCCTCCAGTGAGG | 1595 |
| HMGA1 | AAGGGAAGATGAGTGAGTCGAG | 1506 | TCCTCCAGTGAGGAGCAGG | 1567 |
| HMGA1 | CCCAGCCATCACTCTTCC | 1503 | CTCCTCCTCCGAGGACTCCT | 1549 |
| HMGA1 | ATCCCAGCCATCACTCTTCCACCT | 1520 | TCACTGCTCCTCCTCCGAGG | 1547 |
| HMGA1 | CACCTGCTCCTTAGAGAAGGGAA | 1516 | CAGAAGGAAGCTGCTCCTCCAG | 1571 |
| HMGA1 | AGTGAGTCGAGCTCGAAGTCC | 1512 | CACGCATGGGTCACTGCTC | 1551 |
| HMGA1 | AGCCCTTGGCCTCCAAGCAG | 1576 | GAGCAGGCGGCACGCATG | 1553 |
| HMGA1 | AAGATGAGTGAGTCGAGCTCGAA | 1514 | AGCAAAGCTGTCCAGTCCC | 1613 |
| HMGA1 | AGCGCTGGTAGGGAGTCAG | 1614 | CTGGTGTGCTGTGTAGTGTGG | 1615 |
| HMGA1 | AAGCAGCCTCCGGTGAGTC | 1616 | TGTGTAGTGTGGTGGTGAGGG | 1617 |
| HMGA1 | TCGAAGTCCAGCCAGCCCTT | 1618 | CAAAGCTGTCCAGTCCCAGAAGG | 1619 |
| HMGA1 | CTCCGGTGAGTCCCGGGA | 1620 | GTGTGCTGTGTAGTGTGGTGGTGA | 1621 |
| HMGA1 | GGGACAGCGCTGGTAGGGAG | 1622 | GTGAGGGCACAGGTGGAAGAT | 1623 |
| HMGA1 | CGAAGTGCCAACACCTAAGAG | 1624 | TGTCCAGTCCCAGAAGGAAG | 1525 |
| HMGA1 | CCAACACCTAAGAGACCTCGG | 1626 | AAGCTGCTCCTCCAGTGAGG | 1595 |
| HMGA1 | CGACCAAAGGGAAGCAAA | 1268 | GAGCGGAGCAAAGCTGTC | 1629 |
| HMGA1 | AAGGGAAGCAAAAACAAGGG | 1630 | AGCAAAGCTGTCCAGTCCC | 1613 |
| HMGA1 | CCCAGCGAAGTGCCAACAC | 1632 | CAAAGCTGTCCAGTCCCAGAAGG | 1619 |
| HMGA1 | CCTAAGAGACCTCGGGGCCG | 1634 | AGTGAGGAGCAGGCGGCAC | 1537 |
| HMGA1 | GGGGCCGACCAAAGGGAAG | 1636 | CAGAAGGAAGCTGCTCCTCCAG | 1571 |
| HMGA1 | TCGAAGTCCAGCCAGCCCTT | 1618 | CCTCCGAGGACTCCTGCGAG | 1539 |
| HMGA1 | AGCCAGGCCGGTCCTCAG | 1550 | GGTGGGAGCGGAGCAAAGCT | 1641 |
| HMGA1 | GTCCTCAGCGCCCAGCAC | 1546 | ATGGTGGGCCTGGGGAAG | 1643 |
| HMGA1 | TTTGCTACCAGCGGCGGC | 1644 | CTGGGGAAGGGGTGGGGG | 1645 |
| HMGA1 | CGAGCTCGAAGTCCAGCCAG | 1646 | GGTGGGAGCGGAGCAAAGCT | 1641 |
| HMGA1 | AGCCAGGCCGGTCCTCAG | 1550 | CTGGGGAAGGGGTGGGGG | 1645 |
| HMGA1 | AGCCCTTGGCCTCCAAGCAG | 1576 | CCGAGGTCTCTTAGGTGTTGGCACTTC | 1519 |
| HMGA1 | TGGCCTCCAAGCAGGAAAAG | 1652 | AAGCTGCTCCTCCAGTGAGG | 1595 |
| HMGA1 | AGCCAGGCCGGTCCTCAG | 1550 | CTGCGAGATGCCCTCCTCTT | 1655 |
| HMGA1 | CTGGCGCGGCTCCAAGAAG | 1538 | TTTGGGTCTGCCCCTTGGTT | 1565 |
| HMGA1 | CTCCCCTGAGCCGGTGCTG | 1560 | GGTCACTGCTCCTCCTCCGA | 1659 |
| HMGA1 | AGCCGGTGCTGCGCTCCT | 1564 | TCACTGCTCCTCCTCCGAGGACTC | 1661 |
| HMGA1 | CGGTGCTGCGCTCCTCTAATT | 1662 | CGGCACGCATGGGTCACT | 1663 |
| HMGA1 | TGCTGCGCTCCTCTAATTGGGACT | 1664 | GTTTCCTTCCTGGAGTTGTGGTGGTTT | 1561 |
| HMGA1 | GCTCTTTTTAAGCTCCCCTG | 1568 | CCTTGGTTTCCTTCCTGGAG | 1563 |
| HMGA1 | GGTTTCAGATCCGCATTTGC | 1668 | CAGAAGGAAGCTGCTCCTCCAG | 1571 |
| HMGA1 | TCTCTCCCGGTTTCAGATCC | 1670 | AGCAAAGCTGTCCAGTCCC | 1613 |
| HMGA1 | TTTCAGATCCGCATTTGCTACCAG | 1672 | CAAAGCTGTCCAGTCCCAGAAGG | 1619 |
| HMGA1 | TCCTTAGAGAAGGGAAGATGAGTG | 1524 | CACTTCGCTGGGCTCCTT | 1675 |
| HMGA1 | CGAGCTCGAAGTCCAGCCAG | 1646 | GGTCACTGCTCCTCCTCCGA | 1659 |
| HMGA1 | CTGGCGCGGCTCCAAGAAG | 1538 | CCTGCGAGATGCCCTCCTCTT | 1679 |
| HMGA1 | GCCGGGGCTATTTCTGGC | 1588 | AGATGCCCTCCTCTTCCTCC | 1681 |
| HMGA1 | TTTGCTACCAGCGGCGGC | 1644 | GAGCAGGCGGCACGCATG | 1553 |
| HMGA1 | GCTCCTCTAATTGGGACTCC | 1554 | GCAGCACCCTTGTTTTTGCT | 1543 |
| HMGA1 | TGGGTCGCTCTTTTTAAGCTC | 1566 | TCCTGGAGTTGTGGTGGTTT | 1555 |
| HMGA1 | ATCCGCATTTGCTACCAGC | 1548 | CCTTGGTTTCCTTCCTGGAG | 1563 |
| HMGA1 | GTGCTGCGCTCCTCTAATTG | 1562 | TCTGCCCCTTGGTTTCCTTC | 1557 |
| HMGA1 | GCTCTTTTTAAGCTCCCCTG | 1568 | TCCTCCAGTGAGGAGCAGG | 1567 |
| HMGA1 | GCCCCTGGGTCGCTCTTTT | 1570 | AGCTGTCCAGTCCCAGAAGG | 1695 |
| HMGA1 | GTCCTCAGCGCCCAGCAC | 1546 | AGATGCCCTCCTCTTCCTCC | 1681 |
| HMGA1 | CTGGCGCGGCTCCAAGAAG | 1538 | TCACTGCTCCTCCTCCGAGGACTC | 1661 |
| HMGA1 | GCCGGGGCTATTTCTGGC | 1588 | TCTGCCCCTTGGTTTCCTTC | 1557 |
| HMGA1 | TTTCAGATCCGCATTTGCTAC | 1702 | GAAGGAAGCTGCTCCTCCAG | 1703 |
| HMGA1 | ATCCCAGCCATCACTCTTCCACCT | 1520 | CCTCCGAGGACTCCTGCGAG | 1539 |
| HMGA1 | GTCCTCAGCGCCCAGCAC | 1546 | CTGGGGAAGGGGTGGGGG | 1645 |
| HMGA1 | ATCCGCATTTGCTACCAGC | 1548 | TCCTCCAGTGAGGAGCAGG | 1567 |
| HMGA1 | GCTCTTTTTAAGCTCCCCTG | 1568 | AGCAAAGCTGTCAGTCCC | 1613 |
| HMGA1 | GGGTTTAGCCCTAGCCGCTA | 1712 | CAAAGCTGTCCAGTCCCAGAAGG | 1619 |
| HMGA1 | GCCTCGGGGGTTTAGCCCTA | 1714 | GGTGGGAGCGGAGCAAAGCT | 1641 |
| HMGA1 | CTGGAGCCTGATGCCTCG | 1716 | ATGGTGGGCCTGGGGAAG | 1643 |
| HMGA1 | CCTGATGCCTCGGGGGTTTA | 1718 | CTGGGGAAGGGGTGGGGG | 1645 |
| HMGA1 | CGGGTCTGGAGCCTGATG | 1720 | GGTGGTGATGGTGGGCCT | 1721 |
| HMGA1 | ATCACTCTTCCACCTGCTCC | 1722 | TGTGTAGTGTGGTGGTGAGGG | 1617 |
| HSC20 | TCAGAGAAGCATTCGACCCT | 1724 | TTGTCATCCACCCACCTCA | 1725 |
| HSC20 | TCAGAGAAGCATTCGACCCT | 1724 | CTTGTTCAAAAGCACTGCTCAC | 1727 |
| HSC20 | AAGCATTCGACCCTGGTGAA | 1728 | AAAGCACTGCTCACATTGTCAG | 1729 |
| HSC20 | TTCGACCCTGGTGAATGATG | 1730 | CACTGCTCACATTGTCAGTAAATTC | 1731 |
| HSC20 | CCTGAGCAGAGGACTGTACCTT | 1732 | TTGTCATCCACCCACCTCA | 1725 |
| HSC20 | GCCTATAAGACCCTCCTGGC | 1734 | AAATTTCCTTGGCTTCTTCAAAG | 1735 |
| HSC20 | GAATGATGCCTATAAGACCCTCC | 1736 | GTGCCCAGCAAGAACTTTATTT | 1737 |
| HSC20 | ATACAGCGAAGCTCCAGCAC | 1738 | CATCTTTGTCAAAATTTCCTTGG | 1739 |
| HSC20 | TCCTTCAGAGTTGATACAGCGA | 1740 | TTGTCAAAATTTCCTTGGCTTCTT | 1741 |
| HSC20 | CAACCGTTCCTTCAGAGTTGA | 1742 | ATTTGAAAAGTATCTCATCTTTGTCAA | 1743 |
| HSC20 | CCCACTCGAGACTACTTCAGC | 1744 | TCCACAATTAAAGGGGAATCTTC | 1745 |
| HSC20 | TTCTTCAGCCAGAGGTCTCAG | 1746 | TCCACAATTAAAGGGGAATCTTC | 1745 |
| HSC20 | ACCTGACCCCACTCGAGACT | 1747 | AACTTTAAACTATCCACAATTAAAGGG | 1748 |
| HSC20 | CCAGATTTCTTCAGCCAGAGG | 1749 | CTTTAAACTATCCACAATTAAAGGGG | 1750 |
| HSC20 | GACCCTGGTGAATGATGCCTATA | 1751 | CTCACATTGTCAGTAAATTCTTTCTGT | 1750 |
| HSC20 | CCTGAGCAGAGGACTGTACCTT | 1732 | TCCACAATTAAAGGGGAATCTTC | 1745 |
| HSC20 | CTATAAGACCCTCCTGGCCC | 1755 | CATCTTTGTCAAAATTTCCTTGG | 1739 |
| HSC20 | TCCTTCAGAGTTGATACAGCGA | 1740 | AAATTTCCTTGGCTTCTTCAAAG | 1735 |
| HSC20 | ATACAGCGAAGCTCCAGCAC | 1738 | TTGTCAAAATTTCCTTGGCTTCTT | 1741 |
| HSC20 | AGAGTTGATACAGCGAAGCTCC | 1761 | CTTTAAACTATCCACAATTAAAGGGG | 1750 |
| HSC20 | TTCTTCAGCCAGAGGTCTCAG | 1746 | CTTTAAACTATCCACAATTAAAGGGG | 1750 |
| HSC20 | CGTCTTGTCCACCCAGATTT | 1764 | GGGAATCTTCTTTAACTTGATCTTTTC | 1765 |
| HSC20 | TCAGAGAAGCATTCGACCCT | 1724 | CCTGTCCATTTCATAATCTGTCC | 1767 |
| HSC20 | GCCTATAAGACCCTCCTGGC | 1734 | CAGCTTCACTTTCAGCTTCTGC | 1769 |
| HSC20 | TTCGACCCTGGTGAATGATG | 1730 | TTCTATGAGGAATTGCCTGTCC | 1771 |
| HSC20 | CCTGAGCAGAGGACTGTACCTT | 1732 | TTCAATCTCTTTCATGGCAGC | 1773 |
| HSC20 | GAATGATGCCTATAAGACCCTCC | 1736 | CACTTTCAGCTTCTGCGAGTTT | 1775 |
| HSC20 | AAGCATTCGACCCTGGTGAA | 1728 | GGAATTGCCTGTCCATTTCA | 1777 |
| HSC20 | GACCCTGGTGAATGATGCCTATA | 1751 | CCATTATTTCTATGAGGAATTGCC | 1779 |
| HSC20 | AGAGTTGATACAGCGAAGCTCC | 1761 | TGTCCTTTCAGGAATCTCTATTCC | 1781 |
| HSC20 | CAACCGTTCCTTCAGAGTTGA | 1742 | CTTTCATGGCAGCTTCACTTTC | 1783 |
| HSC20 | TCCTTCAGAGTTGATACAGCGA | 1740 | CAGGAATCTCTATTCCATGGAGC | 1785 |
| HSC20 | ATACAGCGAAGCTCCAGCAC | 1786 | TTTGACAATGGATTCAATCTCTTTC | 1787 |
| HSC20 | AGTTGATACAGCGAAGCTCCAGCACAG | 1788 | CAATGGATTCAATCTCTTTCATGGCAG | 1789 |
| HSC20 | CGTCTTGTCCACCCAGATTT | 1764 | CCATTTCATAATCTGTCCTTTCAGG | 1791 |
| HSC20 | CCAGATTTCTTCAGCCAGAGG | 1749 | TGCGAGTTTTTCATTGATTTCC | 1793 |
| HSC20 | AGCAACTGCAGCGTCTTGTC | 1794 | CATAATCTGTCCTTTCAGGAATCTCT | 1795 |
| HSC20 | AAGCTCCAGCACAGGTACCA | 1796 | AGCTTCTGCGAGTTTTTCATTG | 1797 |
| HSC20 | GGGAGACTGGAAGACTTGAATG | 1798 | CACTGCTCACATTGTCAGTAAATTC | 1731 |
| HSC20 | GACTGGAAGACTTGAATGAATAGG | 1800 | CTCACATTGTCAGTAAATTCTTTCTGT | 1750 |
| HSC20 | GGCCTGGGAGACTGGAAGAC | 1802 | AAATTTCCTTGGCTTCTTCAAAG | 1735 |
| HSC20 | GTACTTGAGGGGCAGGGC | 1804 | CATCTTTGTCAAAATTTCCTTGG | 1739 |
| HSC20 | GGCAGGGCCTGGGAGACTG | 1806 | CTTTGTCAAAATTTCCTTGGCTTCTTC | 1807 |
| HSC20 | AGCAACTGCAGCGTCTTGTC | 1794 | ATTTGAAAAGTATCTCATCTTTGTCAA | 1809 |
| IGSF4 | CACCACCATCCTTACCATCATC | 1810 | AGAATGATGAGCAAGCACAGC | 1811 |
| IGSF4 | CGACGACAGAACCAGCAGTT | 1812 | AGAATGATGAGCAAGCACAGC | 1811 |
| IGSF4 | ACACAACGGCGACGACAGAA | 1813 | AAGCACAGCATGGCGAACAC | 1814 |
| IGSF4 | CACCACCATCCTTACCATCATC | 1810 | CAAAATAGCGCCCCAGAATG | 1816 |
| IGSF4 | ACAACTATCCCTCCTCCCACA | 1817 | ATCGAGCCTTCTTCACCTGC | 1818 |
| IGSF4 | ATCCCTCCTCCCACAACAAC | 1819 | CATGATCCACTGCCCTGATC | 1820 |
| IGSF4 | ACCACCACCACCATCCTTAC | 1821 | TTATGTCTGGCAAAATAGCGC | 1822 |
| IGSF4 | CCCCCACAACTATCCCTCCT | 1823 | TTCTTCACCTGCTCGGGAAT | 1824 |
| IGSF4 | CCTCCCACAACAACCACCAC | 1825 | ATGAGCAAGCACAGCATGGC | 1826 |
| IGSF4 | CCCAACCTGTTCATCAATAACC | 1827 | CCCTGATCGAGCCTTCTTC | 1828 |
| IGSF4 | ATGGTAACTTGGGTGAGAGTCG | 1829 | CACCGATCACGGCATGAT | 1830 |
| IGSF4 | ATGGTACATACCGCTGTGAAGC | 1831 | GCCCCAGAATGATGAGCAAG | 1832 |
| IGSF4 | ATGAAATGCCTCAACACGCC | 1833 | CACTGCCCTGATCGAGCCTT | 1834 |
| IGSF4 | TGGGGAAAGCTCACTCGGATTA | 1835 | AATAGCGCCCCAGAATGATGAGC | 1836 |
| IGSF4 | CTTCAAACATAGTGGGGAAAGC | 1837 | GCTCCTTTGGCTTCATGAGT | 1838 |
| IGSF4 | GCTCACTCGGATTATATGCTGTATG | 1839 | TTATAGCTGTGTCTGCGTCTGC | 1840 |
| IGSF4 | AACATAGTGGGGAAAGCTCACTC | 1841 | GTCATCGGCTCCTTTGGCTT | 1842 |
| IGSF4 | TGTGAAGCTTCAAACATAGTGGG | 1843 | TGCGTCTGCTGCGTCATC | 1844 |
| IGSF4 | ATACCGCTGTGAAGCTTCAAACATAGT | 1845 | GCTGCGTCATCGGCTCCTTT | 1846 |
| IGSF4 | CAGATAATGGTACATACCGCTGTG | 1847 | CCTCCTTCTGCATTGATTATAGC | 1848 |
| IGSF4 | AACAAAACAGATAATGGTACATACCG | 1849 | CATTGATTATAGCTGTGTCTGCG | 1850 |
| IGSF4 | TCTGGGCCCAACCTGTTCAT | 1851 | GTGTCTGCGTCTGCTGCGTC | 1852 |
| IGSF4 | GTACTGTCTGGGCCCAACCT | 1853 | CCTTCTGCATTGATTATAGCTGTGTCT | 1854 |
| IGSF4 | CCTCCCACAACAACCACCAC | 1825 | AAGCACAGCATGGCGAACAC | 1814 |
| IGSF4 | CTTCAAACATAGTGGGGAAAGC | 1857 | ATCACGGCATGATCCACTG | 1858 |
| IGSF4 | ATGGTACATACCGCTGTGAAGC | 1831 | ATGGCGAACACCACCACC | 1860 |
| IGSF4 | TGGGGAAAGCTCACTCGGATTA | 1835 | CACGACGCCACCGATCAC | 1862 |
| IGSF4 | AACAAAACAGATAATGGTACATACCG | 1849 | CCTTTGGCTTCATGAGTGAAG | 1864 |
| IGSF4 | GTACATACCGCTGTGAAGCTTCAAAC | 1865 | GCTGCGTCATCGGCTCCTTT | 1846 |
| IGSF4 | TCAACACGCCGTACTGTCTG | 1867 | TTGGCTTCATGAGTGAAGTATGTAC | 1868 |
| IGSF4 | ATGCCTCAACACGCCGTACT | 1869 | CGGCTCCTTTGGCTTCATGA | 1870 |
| IGSF4 | GAGTCGATGATGAAATGCCTC | 1871 | TTCGGAGTCGTTCTGTCCTC | 1872 |
| IGSF4 | ACGCCGTACTGTCTGGGCCC | 1873 | TCTTCGGAGTTGTTCTGTCCTCCTTCT | 1874 |
| IGSF4 | AACAAAACAGATAATGGTACATACCG | 1849 | GCTCCTTTGGCTTCATGAGT | 1838 |
| KITLG | TGATGCCTTCAAGGACTTTGT | 1877 | CTGCCCTTGTAAGACTTGGC | 1878 |
| KITLG | CCAGGCTCTTTACTCCTGAAGA | 1879 | TCCAGTATAAGGCTCCAAAAGC | 1880 |
| KITLG | TCATTCAAGAGCCCAGAACC | 1881 | CTCCAAAAGCAAAGCCAATT | 1882 |
| KITLG | GTGTGGTTTCTTCAACATTAAGTCC | 1883 | TAAGGCTCCAAAAGCAAAGC | 1884 |
| KITLG | CAAGGACTTTGTAGTGGCATCTG | 1885 | GAAAACAATGCTGGCAATGC | 1886 |
| KITLG | GCATCTGAAACTAGTGATTGTGTGG | 1887 | ATAAGAGAAAACAATGCTGGCAA | 1888 |
| KITLG | GATCCATTGATGCCTTCAAGG | 1889 | CCAAAAGCAAAGCCAATTATAAGAG | 1890 |
| KITLG | CCAGAACCCAGGCTCTTTACT | 1891 | GCCCAGTGTAGGCTGGAGTC | 1892 |
| KITLG | GGCTCTTTACTCCTGAAGAATTCTTT | 1893 | CCATGGCTGCCCAGTGTAG | 1894 |
| KITLG | AAGAGCCCAGAACCCAGGCT | 1895 | AGGGGGATTTTTGGCCTTC | 1896 |
| KITLG | GGACTTTGTAGTGGCATCTGAAACTAG | 1897 | AATGCTGGCAATGCCATGG | 1898 |
| KITLG | TGCCTTCAAGGACTTTGTAGTGGC | 1899 | CAATGCCATGGCTGCCCAGT | 1900 |
| KITLG | AAAATCATTCAAGAGCCCAGAACCCAG | 1901 | GTATAAGGCTCCAAAAGCAAAGCCAAT | 1902 |
| KITLG | GTGATTGTGTGGTTTCTTCAACA | 1903 | CTGCCCTTGTAAGACTTGGC | 1878 |
| KITLG | GAAACTAGTGATTGTGTGGTTTCTTC | 1905 | CCTTGTAAGACTTGGCTGTCTCTT | 1906 |
| KITLG | TTCTTCAACATTAAGTCCTGAGAAAG | 1907 | TTTGTATATTTTCAACTGCCCTTG | 1908 |
| KITLG | GTGGAGTGCGTGAAAGAAAACTCATC | 1909 | CAACTGCCCTTGTAAGACTTGGCTGTC | 1910 |
| KITLG | TCCCCGGGATGGATGTTTTG | 1911 | GTCTCCAGGGGGATTTTTGGCCTT | 1912 |
| LGALS9 | GTGATGGTGAACGGGATCCT | 1913 | GTTGGCAGGCCACACGCC | 1914 |
| LGALS9 | ACGGGATCCTCTTCGTGCAGTA | 1915 | GTTGGCAGGCCACACGCC | 1914 |
| LGALS9 | GGATCCTCTTCGTGCAGTACTTCCAC | 1916 | AATGGGAGCCGGGTTGGC | 1917 |
| LGALS9 | GTGATGGTGAACGGGATCCT | 1913 | GCTCTGCACTGTGTGGATGA | 1919 |
| LGALS9 | GACACCATCTCCGTCAATGG | 1920 | AGAGAACATCTGTCCAGGGG | 1921 |
| LGALS9 | AGTACTTCCACCGCGTGC | 1922 | TGTGTGGATGACTGTCTGGG | 1923 |
| LGALS9 | GGTGAACGGGATCCTCTTCG | 1924 | CTGCACTGTGTGGATGACTGTCT | 1925 |
| LGALS9 | TTCCACCGTGTGGACACCAT | 1926 | ATCTGTCCAGGGGCGCTCTG | 1927 |
| LGALS9 | CCGTGTGGACACCATCTCCG | 1928 | AGGGGCGCTCTGCACTGTGT | 1929 |
| LGALS9 | AATGGCTCTGTGCAGCTGTC | 1930 | GGGTACATCATAGGTGGGATGG | 1931 |
| LGALS9 | GCTGTCCTACATCAGCTTCCA | 1932 | GGGGTGGGGGTACATCATAG | 1933 |
| LGALS9 | TCTCCGTCAATGGCTCTGTG | 1934 | ATAGGTGGGATGGCGGGAGT | 1935 |
| LGALS9 | GGCTCTGTGCAGCTGTCCTACAT | 1936 | ATAGGCGGGGTGGGGGTACAT | 1937 |
| LGALS9 | GTGCCCTTCCACCGTGTG | 1938 | GGTACAGCCCTCCCAGAATG | 1939 |
| LGALS9 | TGTGCAGCTGTCCTACATCAGCTT | 1940 | GGTGGTGATGAAAGGCATCG | 1941 |
| LGALS9 | CTTCCACCGCGTGCCCTTC | 1942 | CCCTCCCAGAATGGTGGTGAT | 1943 |
| LGALS9 | CTGGTGCAGAGCTCAGATTTC | 1944 | CAGAATGGTGGTGATGAAAGG | 1945 |
| LGALS9 | CTTTGACCTCTGCTTCCTGG | 1946 | TGGACTTGGATGGGTACAGC | 1947 |
| LGALS9 | GCTTCCTGGTGCAGAGCTC | 1948 | AGGAGGATGGACTTGGATGG | 1949 |
| LGALS9 | ACCTCTGCTTCCTGGTGCAG | 1950 | TTGGATGGGTACAGCCCTCC | 1951 |
| LGALS9 | ATGCCCTTTGACCTCTGCTT | 1952 | CTGACAGGAGGATGGACTTG | 1953 |
| LGALS9 | ACACATGCCTTTCCAGAAGG | 1954 | AGGACAGTGCCTGACAGGAG | 1955 |
| LGALS9 | TTTCCAGAAGGGGATGCC | 1956 | AGTGCCTGACAGGAGGATGG | 1957 |
| LGALS9 | AGGAGAGGAAGACACACATGC | 1958 | CACTGGGCAGGACAGTGC | 1959 |
| LGALS9 | AGGGGATGCCCTTTGACCTC | 1960 | TGGGCAGGACAGTGCCTGAC | 1961 |
| LGALS9 | GGAAGACACACATGCCTTTCC | 1962 | CTGAGCACTGGGCAGGACAG | 1963 |
| MCL1 | CCAAGGACACAAAGCCAATG | 1964 | TGGAAGAACTCCACAAACCC | 1965 |
| MCL1 | TGGAGACCTTACGACGGGTT | 1966 | TACTCCAGCAACACCTGCAA | 1967 |
| MCL1 | GAAGGCGCTGGAGACCTTAC | 1968 | CACATTCCTGATGCCACCTT | 1969 |
| MCL1 | GCAGCGCAACCACGAGAC | 1970 | CAAACCAGCTCCTACTCCAGC | 1971 |
| MCL1 | GACACAAAGCCAATGGGCAG | 1972 | AGGTCCTCTACATGGAAGAACTCC | 1973 |
| MCL1 | ACGAGACGGCCTTCCAAG | 1974 | TTAGATATGCCAAACCAGCTCC | 1975 |
| MCL1 | CTTACGACGGGTTGGGGATG | 1976 | ACACCTGCAAAAGCCAGCAG | 1977 |
| MCL1 | AAAGCCAATGGGCAGGTCTG | 1978 | TTCCTGATGCCACCTTCTAGGT | 1979 |
| MCL1 | TTATCTCTCGGTACCTTCGGG | 1980 | TCTACATGGAAGAACTCCACAAAC | 1981 |
| MCL1 | CAACCACGAGACGGCCTT | 1982 | ATATGCCAAACCAGCTCCTACTCC | 1983 |
| MCL1 | GTCTGGGGCCACCAGCAG | 1984 | AAGCCAGCAGCACATTCCTG | 1985 |
| MCL1 | AGCAGGAAGGCGCTGGAGAC | 1986 | CAGCAACACCTGCAAAAGCC | 1987 |
| MCL1 | GTACCTTCGGGAGCAGGC | 1988 | CCTTCTAGGTCCTCTACATGGAAG | 1989 |
| MCL1 | GGGCCACCAGCAGGAAGG | 1990 | TGATGCCACCTTCTAGGTCCTCTA | 1991 |
| MCL1 | ATGGGCAGGTCTGGGGCC | 1992 | CAGCAGCACATTCCTGATGCCA | 1993 |
| MCL1 | CGGCGCCAAGGACACAAAG | 1994 | TGCAAAAGCCAGCAGCACAT | 1995 |
| MCL1 | GTACCGGCAGTCGCTGGAGATTA | 1996 | CAGCACATTCCTGATGCCACCTTCTAG | 1997 |
| NRG1 | GTTTACTGGTGATCGCTGCC | 1998 | TGGGCTGTGGAAGTATAGTGAC | 1999 |
| NRG1 | GTTTACTGGTGATCGCTGCC | 1998 | ACCACACACATGATGCCGAC | 2000 |
| NRG1 | GTGCCCAAATGAGTTTACTGG | 2001 | ACATGATGCCGACCACAAG | 2002 |
| NRG1 | GATCGCTGCCAAAACTACGT | 2003 | TAGGCCACCACACACATGAT | 2004 |
| NRG1 | CCAAATGAGTTTACTGGTGATCG | 2005 | TTGGTTTTGCAGTAGGCCAC | 2006 |
| NRG1 | CTGCCAAAACTACGTAATGGC | 2007 | TTTGCAGTAGGCCACCACAC | 2008 |
| NRG1 | AATGAGTTTACTGGTGATCGCTGCCAA | 2009 | CACAAGGAGGGCGATGCAGAT | 2010 |
| NRG1 | ACTGGTGATCGCTGCCAAAACTAC | 2011 | GATGCCGACCACAAGGAGGG | 2012 |
| NRG1 | GTGATCGCTGCCAAAACTACGTAATGG | 2013 | GGCGATGCAGATGCCGGTTAT | 2014 |
| NRG1 | CTGGGACAAGCCATCTTGTAA | 2015 | TATGGTCAGCACTCTCTTCTGG | 2016 |
| NRG1 | GAGTGCTTCATGGTGAAAGACC | 2017 | TCTCTTCTGGTACAGCTCCTCC | 2018 |
| NRG1 | AACTTTCTGTGTGAATGGAGGG | 2019 | AGATGCCGGTTATGGTCAGC | 2020 |
| NRG1 | TACATCTACATCCACCACTGGG | 2021 | TCAGCACTCTCTTCTGGTACAGC | 2022 |
| NRG1 | AACCCCTCGAGATACTTGTGC | 2023 | CCGGTTATGGTCAGCACTCT | 2024 |
| NRG1 | ATCTACATCCACCACTGGGACAAGCC | 2025 | AGATGCCGGTTATGGTCAGCACTCTCT | 2026 |
| NRG1 | ACGTAATGGCCAGCTTCTACA | 2027 | GGTGGGTTAGGATGGTGAGG | 2028 |
| NRG1 | AAAACTACGTAATGGCCAGCTTC | 2029 | TGTTTCGTTCAGACCGAAGG | 2030 |
| NRG1 | GTGCGGAGAAGGAGAAAACTT | 2031 | GAAGACGGTCATGCAGCTTT | 2032 |
| NRG1 | AAGACCTTTCAAACCCCTCG | 2033 | CCCATTGGCAATGTTCATC | 2034 |
| NRG1 | CTTGTAAAATGTGCGGAGAAGG | 2035 | GCAATGTTCATCATATTGTTTCG | 2036 |
| NRG1 | GTGAATGGAGGGGAGTGCTT | 2037 | TTAGGATGGTGAGGCCCATT | 2038 |
| NRG1 | CAAGCCATCTTGTAAAATGTGC | 2039 | TCATCATATTGTTTCGTTCAGACC | 2040 |
| NRG1 | CCTTTCAAACCCCTCGAGATAC | 2041 | GCAGCTTTTTCCGCTGTTTC | 2042 |
| NRG1 | CATGGTGAAAGACCTTTCAAACC | 2043 | AAGGCTCTGCCGAAGACG | 2044 |
| NRG1 | GAGGGGAGTGCTTCATGGT | 2045 | TCACCAGCTGGACATTCTCG | 2046 |
| NRG1 | TAAAATGTGCGGAGAAGGAGAAAA | 2047 | CGTTCAGACCGAAGGCTCTG | 2048 |
| NRG1 | TTCTGTGTGAATGGAGGGGAGTGC | 2049 | TGAGGCCCATTGGCAATGTT | 2050 |
| NRG1 | AGGAGAAAACTTTCTGTGTGAATGGAG | 2051 | GACCGAAGGCTCTGCCGAAG | 2052 |
| NRG1 | CTCCCATTAGAATATCAGTATCCACAG | 2053 | GTCATGCAGCTTTTTCCGCT | 2054 |
| NRG1 | ATGCCAGCCTCAACTGAAGG | 2055 | ATATTGTTTCGTTCAGACCGAAGGCTC | 2056 |
| NRG1 | TCCACAGAAGGAGCAAATACTTC | 2057 | CTGGAGATGACGTTTTTAGATACG | 2058 |
| NUP98 | TCGTATCTGGAGGGTTCTGG | 2059 | TCAGATTCCATGTGTGCTCG | 2060 |
| NUP98 | TCGTATCTGGAGGGTTCTGG | 2059 | TCTCGAACAGCCTTCTCACG | 2062 |
| NUP98 | CGAGATGTCTGCTTTCACCTTC | 2063 | TCAGATTCCATGTGTGCTCG | 2060 |
| NUP98 | ACTCACAGACACCACTTCGAGA | 2065 | TCTCTTTAGCCCAAGATTCAGG | 2066 |
| NUP98 | TGTGATAGCGGAGGAGCAAA | 2067 | TCTGGGTAAGGAAAGTCTCTTTAGC | 2068 |
| NUP98 | CCCACTTCCTTCGTATCTGG | 2069 | GGGTAAGCAGCTCTCGAACA | 2070 |
| NUP98 | GAGGGTTCTGGCTGTGTGATA | 2071 | CAAGATTCAGGGGTCTCCAA | 2072 |
| NUP98 | ACACCACTTCGAGATGTCTGC | 2073 | ATCCATTTGGCAGGTACACG | 2074 |
| NUP98 | AGGAGCAAAACTCACAGACACC | 2075 | GTACACGGAGCTTCTGGGTAAG | 2076 |
| NUP98 | CTGGCTGTGTGATAGCGGAG | 2077 | AGGAAAGTCTCTTTAGCCCAAGA | 2078 |
| NUP98 | TGACAGTGACAGATATGCCTGC | 2079 | AGCAGCTCTCGAACAGCCTT | 2080 |
| NUP98 | CTTCCTTCGTATCTGGAGGGTT | 2081 | GTCTCCAACAGCTGGCAGTG | 2082 |
| NUP98 | ATAGCGGAGGAGCAAAACTCAC | 2083 | GGAGCTTCTGGGTAAGGAAAGT | 2084 |
| NUP98 | CTGCTTTCACCTTCTAAAACTCTACAG | 2085 | GCCTCGTGGATCCATTTG | 2086 |
| NUP98 | CCACTTCGAGATGTCTGCTTTCAC | 2087 | TCGTGGATCCATTTGGCAGG | 2088 |
| NUP98 | TATCTGGAGGGTTCTGGCTGTGT | 2089 | AGTGCCGGGTAAGCAGCTCT | 2090 |
| NUP98 | ATATGCCTGCTCCCCACTTC | 2091 | TTCAGGGGTCTCCAACAGCT | 2092 |
| NUP98 | CCTGCTCCCCACTTCCTTCGTA | 2093 | AGCTCTCGAACAGCCTTCTCACGTATG | 2094 |
| NUP98 | GAGCAAAACTCACAGACACCACTTCGA | 2095 | CATTTGGCAGGTACACGGAGCTT | 2096 |
| NUP98 | CTGTGTGATAGCGGAGGAGCAAAACTC | 2097 | AGCTGGCAGTGCCGGGTAAG | 2098 |
| NUP98 | GACAGATATGCCTGCTCCCC | 2099 | TTAGCCCAAGATTCAGGGGTCTC | 2100 |
| NUP98 | AATACCTCTGACAGTGACAGATATGC | 2101 | GCTTTGGCCTCGTGGATC | 2102 |
| NUP98 | ACTTGTGGGAAGTGCTGAGG | 2103 | TCAGATTCCATGTGTGCTCG | 2060 |
| NUP98 | TCGAAGCATAACAGCAGATCC | 2105 | TCTCTTTAGCCCAAGATTCAGG | 2066 |
| NUP98 | TAACTACACCCATCTCTCAGCG | 2107 | ATCCATTTGGCAGGTACACG | 2074 |
| NUP98 | ATCCTTTGGACTACCGCCTAA | 2109 | GGAGCTTCTGGGTAAGGAAAGT | 2084 |
| NUP98 | CATTATGATCTCAACCAGCTGC | 2110 | TCTCGAACAGCCTTCTCACG | 2062 |
| NUP98 | TAAGCTGGCACTTGTGGGAA | 2113 | TCTGGGTAAGGAAAGTCTCTTTAGC | 2068 |
| NUP98 | ACAGCAGATCCTTTGGACTACC | 2115 | GGGTAAGCAGCTCTCGAACA | 2070 |
| NUP98 | AGTGCTGAGGGCTCTTAACTACAC | 2117 | GTACACGGAGCTTCTGGGTAAG | 2076 |
| NUP98 | GGCTCTTAACTACACCCATCTCTC | 2119 | AGGAAAGTCTCTTTAGCCCAAGA | 2078 |
| NUP98 | ATCTCTCAGCGCAGTGTGAAG | 2121 | GCCTCGTGGATCCATTTG | 2086 |
| NUP98 | ACTACCGCCTAAGCTGGCAC | 2123 | CAAGATTCAGGGGTCTCCAA | 2072 |
| NUP98 | GAGCCTCGAAGCATAACAGC | 2125 | GTCTCCAACAGCTGGCAGTG | 2082 |
| NUP98 | AGCATAACAGCAGATCCTTTGGA | 2127 | AGTGCCGGGTAAGCAGCTCT | 2090 |
| NUP98 | TGGGAAGTGCTGAGGGCTCT | 2129 | CATTTGGCAGGTACACGGAGCTT | 2096 |
| NUP98 | ACACCCATCTCTCAGCGCAGTGT | 2131 | TCGTGGATCCATTTGGCAGG | 2088 |
| NUP98 | TGCTGGAGCCTCGAAGCATA | 2133 | AGCAGCTCTCGAACAGCCTT | 2080 |
| NUP98 | CTTTGGACTACCGCCTAAGCTGGC | 2135 | AGCTGGCAGTGCCGGGTAAG | 2098 |
| NUP98 | ACTTGTGGGAAGTGCTGAGGGCTCTTA | 2137 | TGAGCTTGTGGCAGCGGTTC | 2138 |
| NUP98 | CGAGATGTCTGCTTTCACCTTC | 2063 | GCTTTGGCCTCGTGGATC | 2102 |
| NUP98 | CTGCTTTCACCTTCTAAAACTCTACAG | 2085 | ATGTGTGCTCGCACAGCTTT | 2142 |
| NUP98 | ACACCACTTCGAGATGTCTGC | 2143 | GCACAGCTTTGGCCTCGT | 2144 |
| NUP98 | CCTGCTCCCCACTTCCTTCGTAT | 2145 | AGCTCTCGAACAGCCTTCTCACGTATG | 2094 |
| NUP98 | ACTCACAGACACCACTTCGAGA | 2147 | AGTGCTTGTCAGATTCCATGTG | 2148 |
| NUP98 | AGGAGCAAAACTCACAGACACC | 2075 | GGCCTCTAAGTGCTTGTCAGAT | 2150 |
| NUP98 | GAGCAAAACTCACAGACACCACTTCGA | 2095 | GGTAAGCAGCTCTCGAACAGCCTTCTC | 2152 |
| NUP98 | CCACTTCGAGATGTCTGCTTTCAC | 2087 | AGCCTTAAATAAGCAAAGGGCC | 2154 |
| NUP98 | TGTGATAGCGGAGGAGCAAA | 2067 | TAAGCAAAGGGCCTCTAAGTGC | 2156 |
| NUP98 | CTGTGTGATAGCGGAGGAGCAAAACTC | 2157 | AGCTTTGGCCTCGTGGATCCATTT | 2158 |
| NUP98 | ATAGCGGAGGAGCAAAACTCACAGACA | 2159 | TGCTCGCACAGCTTTGGCCT | 2160 |
| NUP98 | TTCTGGCTGTGTGATAGCGG | 2161 | CCTTAAATAAGCAAAGGGCCTCTAAGT | 2162 |
| NUP98 | TCCCCACTTCCTTCGTATCTGGAG | 2163 | GATTCCATGTGTGCTCGCACAGC | 2164 |
| NUP98 | GACAGATATGCCTGCTCCCC | 2099 | TCTCTTTAGCCCAAGATTCAGG | 2066 |
| NUP98 | GACAGTGACAGATATGCCTGCTC | 2167 | TCTGGGTAAGGAAAGTCTCTTTAGC | 2068 |
| NUP98 | GGAGGGTTCTGGCTGTGTGATAGC | 2169 | TCGTGGATCCATTTGGCAGG | 2088 |
| NUP98 | AGTGACAGATATGCCTGCTCCCCACTT | 2171 | TGCTCGCACAGCTTTGGCCT | 2160 |
| NUP98 | ATTTGCTTCCACCAACAGCC | 2173 | CAAGATTCAGGGGTCTCCAA | 2072 |
| NUP98 | CGCTCAGCATGTATGAAGAAGC | 2175 | AGGAAAGTCTCTTTAGCCCAAGA | 2078 |
| NUP98 | CAGCATGTATGAAGAAGCATTTCAG | 2177 | TTAGCCCAAGATTCAGGGGTCTC | 2100 |
| NUP98 | CTTCCACCAACAGCCTCCATTT | 2179 | AGCTGGCAGTGCCGGGTAAG | 2098 |
| NUP98 | GGAAACGCTCCCTGGCTATC | 2181 | GTAAGCAGCTCTCGAACAGCCTTC | 2182 |
| NUP98 | ACAGCCTCCATTTCTAGGGC | 2183 | GGCCTCTAAGTGCTTGTCAGAT | 2150 |
| NUP98 | CCTCCATTTCTAGGGCGCTCAG | 2185 | GATTCCATGTGTGCTCGCACAGC | 2164 |
| NUP98 | CATTTCTAGGGCGCTCAGCATGTA | 2187 | AGCAAAGGGCCTCTAAGTGCTTGTCAG | 2188 |
| PAXIP1 | GGCACACGTTTCTCCACTCT | 2189 | GATAACACCTTTCCTCCTGCAC | 2190 |
| PAXIP1 | TGAGCAGAACTACATTCTCCGA | 2191 | CATAGTGGAAAGACTTGGGCAG | 2192 |
| PAXIP1 | CTCTTTCAGCTTGGAAGAATCC | 2193 | GCACACTCTACGATTGCCTTC | 2194 |
| PAXIP1 | TACATTCTCCGAGATGCTGAGG | 2195 | CGATTGCCTTCATAGTGGAAAG | 2196 |
| PAXIP1 | ATCCTTAAAACGGGCACACG | 2197 | TGCTTGGATAACACCTTTCCTC | 2198 |
| PAXIP1 | CAGAACTACATTCTCCGAGATGCT | 2199 | TTTCCTCCTGCACACTCTACG | 2200 |
| PAXIP1 | TGGAAGAATCCTTAAAACGGG | 2201 | TTCTGCTTGTGCTCCATGAG | 2202 |
| PAXIP1 | AAACGGGCACACGTTTCTC | 2203 | GGAAAGATGGCTGCTTGGAT | 2204 |
| PAXIP1 | GGCAGAAGTACTTTTCTCTTTCAGC | 2205 | ACTCTACGATTGCCTTCATAGTGG | 2206 |
| PAXIP1 | TCAGCTTGGAAGAATCCTTAAAAC | 2207 | ATGAGCTTCCGGAAAGATGG | 2208 |
| PAXIP1 | ACTTTTCTCTTTCAGCTTGGAAGA | 2209 | CTTGTGCTCCATGAGCTTCC | 2210 |
| PAXIP1 | CTTAAAACGGGCACACGTTTCTCCAC | 2211 | GCTTCCGGAAAGATGGCTGCTT | 2212 |
| PAXIP1 | CGATTTCTGTCGTGAAGCAC | 2213 | GCAGATTCCAGGTGTGATGTAA | 2214 |
| PAXIP1 | ACATTCTTGGTGGAGAGGTTGC | 2215 | AAAGACTTGGGCAGATTCCAG | 2216 |
| PAXIP1 | AGCAAAGTGACTCGCACCGT | 2217 | GCTCCATGAGCTTCCGGAAA | 2218 |
| PAXIP1 | TGGTGGAGAGGTTGCGGAGT | 2219 | ACTTGGGCAGATTCCAGGTGTGA | 2220 |
| PAXIP1 | TGCACACACCTCATTGCCAG | 2221 | AAGATGGCTGCTTGGATAACACCTTTC | 2222 |
| PAXIP1 | ACACACCTCATTGCCAGCAAAGT | 2223 | CCTCCTGCACACTCTACGATTGCC | 2224 |
| PAXIP1 | TGACGCCAGAGTGGCTGGAA | 2225 | GAGTTCTGCTTGTGCTCCATGAGCTTC | 2226 |
| PAXIP1 | TGCTTCAGGTGTCAGAAGTTCA | 2227 | TCTCGGCATAAATGAAGGTCA | 2228 |
| PAXIP1 | TGGAAGAATGCTTCAGGTGTC | 2229 | TCTGGCAAAATATTCTCGGC | 2230 |
| PAXIP1 | CACATAGTGACGCCAGAGTGG | 2231 | AAATGAAGGTCATTTTCACAGGA | 2232 |
| PAXIP1 | AGTGGCTGGAAGAATGCTTCAGG | 2233 | CGGCATAAATGAAGGTCATTTTCA | 2234 |
| PAXIP1 | TTTCTGTCGTGAAGCACATAGTG | 2235 | GAAGGTCATTTTCACAGGATATTAAAA | 2236 |
| PAXIP1 | GGAAGAATGCTTCAGGTGTCAGAAGTT | 2237 | CTGGCAAAATATTCTCGGCATAAATG | 2238 |
| PAXIP1 | TGACGGCGATTTCTGTCGT | 2239 | CTATGCCTCTGGCAAAATATTCTC | 2240 |
| PAXIP1 | AAGTTCCTGACGGCGATTTC | 2241 | CGAACTCTGCATTGTGAACAT | 2242 |
| PAXIP1 | CCGTGAAGTTCCTGACGG | 2243 | TCAGAACGAACTCTGCATTGTG | 2244 |
| PLD1 | ACGACGCAGATAGCATCAGC | 2245 | TTGCAGTAGTCCTTTCCATGC | 2246 |
| PAXIP1 | CCGCAATGGAGTCTATGGAA | 2247 | CTCTCCCACACCTGTCTGTAAAC | 2248 |
| PAXIP1 | CTGAAAGGAATAGGAAAGCCAAG | 2249 | TCTGTAAACTACGGATGGACCC | 2250 |
| PAXIP1 | TCCAGAAGAGTATTGATGATGTGG | 2251 | CAAGTTGAACCCAGTCTTTGAAG | 2252 |
| PAXIP1 | CCTGTTCAAAACCTACCCATCC | 2253 | AGTCCTTTCCATGCCAGAATC | 2254 |
| PAXIP1 | CTCTACAAGCAGCTCCACAGG | 2255 | TGAAGACGAAATTGCAGTAGTCC | 2256 |
| PAXIP1 | ATCAGCAGCATTGACAGCAC | 2257 | AAAGGTTTATCAAGTTGAACCCAG | 2258 |
| PAXIP1 | AAAGCCAAGAAAGTTCTCCAAA | 2259 | AGAATCTGGTTTCCCCATGC | 2260 |
| PAXIP1 | CAGATAGCATCAGCAGCATTG | 2261 | CCCAGTCTTTGAAGACGAAATTG | 2262 |
| PAXIP1 | ACCTACCCATCCAGAAGAGTATTG | 2263 | GTTTCCCCATGCAGCTCTC | 2264 |
| PAXIP1 | TCCAAATTTAGTCTCTACAAGCAGC | 2265 | CCATGCCAGAATCTGGTTTC | 2266 |
| PAXIP1 | GGAATAGGAAAGCCAAGAAAGTTC | 2267 | ACTACGGATGGACCCGGTAT | 2268 |
| PAXIP1 | TTGATGATGTGGATTCAAAACTG | 2269 | CACCTGTCTGTAAACTACGGATGG | 2270 |
| PAXIP1 | TGGAGTCTATGGAATCCTTAAGACTC | 2271 | ATGCAGCTCTCCCACACCT | 2272 |
| PAXIP1 | AATGAGCCTGTTCAAAACCTACC | 2273 | ACGAAATTGCAGTAGTCCTTTCCA | 2274 |
| PAXIP1 | CACCACCTGCACGACGCAGATA | 2275 | GTCCTTTCCATGCCAGAATCTGGTTTC | 2276 |
| PAXIP1 | GCCAAGAAAGTTCTCCAAATTTAGTC | 2277 | ACTGCAGAGGCAATGTCATG | 2278 |
| PAXIP1 | AGCATTGAGAGCACCTCCA | 2279 | CGCTGGATGAAGTGACGTG | 2280 |
| PAXIP1 | AAGAGTATTGATGATGTGGATTCAAA | 2281 | GGCGTGGAGTACCTGTCAAT | 2282 |
| PAXIP1 | ATTTAGTCTCTACAAGCAGCTCCACAG | 2283 | AATGTCATGCCAGGGCATC | 2284 |
| PAXIP1 | TGGATTCAAAACTGAAAGGAATAGG | 2285 | ATCCGGGGCGTGGAGTAC | 2286 |
| PAXIP1 | CACAGGCACCACCTGCAC | 2287 | ACGTGCCACATCACGAGC | 2288 |
| PAXIP1 | AAAGTTCTCCAAATTTAGTCTCTACAA | 2289 | TTCCCGTGGACTGCAGAG | 2290 |
| PAXIP1 | TTCAAAACCTACCCATCCAGAAGA | 2291 | AGAGGCAATGTCATGCCAGG | 2292 |
| PAXIP1 | AGATAAAAATGAGCCTGTTCAAAACC | 2293 | CATCACGAGCCGCCTTCC | 2294 |
| POLI | AATGGCTCAAACTAAGGACAAGAG | 2295 | TCACGACCATAGTGCTTCTCAG | 2296 |
| POLI | AATGGCTCAAACTAAGGACAAGAG | 2295 | AAAAGACTAGCAAGTAGTTCTTCAATC | 2297 |
| POLI | TGAGTACAATAGCTTGCAGATAAAA | 2298 | AGCTTCAACTTCAGATGAACATTT | 2299 |
| POLI | GAGTCGCCATCTACCTGGTC | 2300 | TCCTCACACACTCCATGCTC | 2301 |
| POLI | CCCAGCTCTGCTGGACATAA | 2302 | TCCTCACACACTCCATGCTC | 2301 |
| POLI | GCTGGACATAAGCTGGTTAACAG | 2303 | CTCTGAGCGCCGAACTCTCT | 2304 |
| POLI | GGACATAAGCTGGTTAACAGAGAGCCT | 2305 | AGCGCCGAACTCTCTCCACC | 2306 |
| POLI | CAGGATGGCAGCTGCTCC | 2307 | TCCACCTCCTCACACACTCC | 2308 |
| POLI | AGGAGCGCAGGATGGCAG | 2309 | ACTCCATGCTCCAGCAGCTC | 2310 |
| POLI | AGCTGCTCCCCCGGGTTG | 2311 | TCACACACTCCATGCTCCAGCAG | 2312 |
| POLI | AGAGAGCCTGGGAGCTGG | 2313 | CTTCATGGTCTGGTACCTCTCTG | 2314 |
| POLI | TGTACCTGTGGAGTGCCG | 2315 | GTCCTGGTGGTGCTGGAG | 2316 |
| POLI | GTTAACAGAGAGCCTGGGAGC | 2317 | TCTGGTACCTCTCTGAGCGC | 2318 |
| POLI | CAGCCTGTACCTGTGGAGTG | 2319 | AGGGCATCTACATCGGACC | 2320 |
| POLI | GGAGCTGGGCAGCCTGTAC | 2321 | TACCTCTCTGAGCGCCGAAC | 2322 |
| POLI | CTGGGCAGCCTGTACCTGT | 2323 | CTACATCGGACCGCAGGACT | 2324 |
| POLI | AGAGGAGGCCGTCAGCTG | 2325 | GGTGCTCAGGTCCTGGTG | 2326 |
| POLI | GCCGTCAGCTGGCAGGAG | 2327 | GCTCAGGTCCTGGTGGTGCT | 2328 |
| PTK2 | TGACAGCTACAACGAGGGTG | 2329 | GATGACAGCTTTCACCAGGC | 2330 |
| PTK2 | TGACAGCTACAACGAGGGTG | 2329 | GATGACAGCTTTCACCAGGC | 2330 |
| PTK2 | AGCTCCACCAAAGAAACCG | 2332 | CCGTCACATTCTCGTACACCT | 2333 |
| PTK2 | GTCATCTGGGAAGCCTTGC | 2334 | CTCGTACACCTTATCATTCGACC | 2335 |
| PTK2 | CCTGCTGACAGCTACAACGA | 2336 | TAGGGACATACTCCTCTGGTGG | 2337 |
| PTK2 | ACCAAAGAAACCGCCTCG | 2338 | TACTGGACATCTCGATGACAGC | 2339 |
| PTK2 | ATCCTGCAGCTCCACCAAAG | 2340 | CTTCACCATAGGGACATACTCCTC | 2341 |
| PTK2 | GCTACAACGAGGGTGTCAAG | 2342 | GCTGGCTGGATTTTACTGGA | 2343 |
| PTK2 | AAGCCTTGCCAGCCTCAG | 2344 | TCACATTCTCGTACACCTTATCATTC | 2345 |
| PTK2 | GAGCTCCCGGTCATCTGG | 2346 | GCTGGATTTTACTGGACATCTCG | 2347 |
| PTK2 | AAGAAACCGCCTCGCCCTG | 2348 | GGACATCTCGATGACAGCTTTCAC | 2349 |
| PTK2 | CTCCCGGTCATCTGGGAAGC | 2350 | TACTCCTCTGGTGGGGCTGG | 2351 |
| PTK2 | TTGCCAGCCTCAGCAGCCCT | 2352 | TTTCACCAGGCCCGTCACATT | 2353 |
| PTK2 | CTGGGAAGCCTTGCCAGCCT | 2354 | CAGGCCCGTCACATTCTCGT | 2355 |
| PTK2 | CCTCGCCCTGGAGCTCCC | 2356 | ACCTTATCATTCGACCGGTCCA | 2357 |
| PTK2 | GCAGCCCTGCTGACAGCTAC | 2358 | GTGGGGCTGGCTGGATTTTA | 2359 |
| PTK2 | TTGGAAACCAACATATATATCAGCC | 2360 | GTCCAGGTTGGCAGTAGGAG | 2361 |
| PTK2 | TATCAGCCTGTGGGTAAACCAG | 2362 | CTGATTTCCTGGGGCTGAAG | 2363 |
| PTK2 | AACCAACATATATATCAGCCTGTGGGT | 2364 | ATTCGACCGGTCCAGGTTGG | 2365 |
| PTK2 | GAGGGATTGGGCAAGTGTTG | 2366 | GGGGGCTGATTTCCTGGG | 2367 |
| PTK2 | GCTGACAGCTACAACGAGGGTGTCAAG | 2368 | CGTGCTCCTAGGGGAGGCTC | 2369 |
| PTK2 | ATGGAAGTCTTCAGGGTCCG | 2370 | AGTTCAATAGCTTCTGTGCCATC | 2371 |
| PTK2 | GAAATGGAAGAAGATCAGCGC | 2372 | AATAATGTCCTCAGGGCCAAG | 2373 |
| PTK2 | GTATTGACAGGGAGGATGGAAG | 2374 | GGTCAGAGTTCAATAGCTTCTGTG | 2375 |
| PTK2 | GCTGGCTGGAAAAAGAGGAA | 2376 | TGGCCAATAATGTCCTCAGG | 2377 |
| PTK2 | AGGGAGGATGGAAGTCTTCAG | 2378 | AGCTCACCCAGGTCAGAGTTC | 2379 |
| PTK2 | AAGATCAGCGCTGGCTGGAA | 2380 | CTCAGGGCCAAGCCGACTTC | 2381 |
| PTK2 | TCTCTCGAGGCAGTATTGACAG | 2382 | CACCCAGGTCAGAGTTCAATAGC | 2383 |
| PTK2 | CAACAGGAAATGGAAGAAGATCA | 2384 | CACAGTGGCCAATAATGTCC | 2385 |
| PTK2 | AGGCAGTATTGACAGGGAGG | 2386 | TCATCTTGTTGATGAGCTCACC | 2387 |
| PTK2 | CGACAGCAACAGGAAATGG | 2388 | GGAATGGTCTCATCCACAGTG | 2389 |
| PTK2 | TGAGACTCTCTCGAGGCAGTATT | 2390 | TTGATGAGCTCACCCAGGTC | 2391 |
| PTK2 | CGTCTAATCCGACAGCAACA | 2392 | TCATCCACAGTGGCCAATAA | 2393 |
| PTK2 | ATCAGCGCTGGCTGGAAAAAGAG | 2394 | ATCCACAGTGGCCAATAATGTCCTCAG | 2395 |
| PTK2 | ATGGAAGAAGATCAGCGCTGGCTG | 2396 | ATGGTCTCATCCACAGTGGCCAAT | 2397 |
| PTK2 | CTAATCCGACAGCAACAGGAAAT | 2398 | AGGAGGGGAATGGTCTCATC | 2399 |
| PTK2 | ACCTGATGTGAGACTCTCTCGAG | 2400 | GCTGGTAGGAGGGGAATGGT | 2401 |
| PTK2 | GCTGACAGCTACAACGAGGGTGTCAAG | 2368 | TTTCACCAGGCCCGTCACATT | 2353 |
| PTPN13 | GACTCCTCATCCATTGAAGACC | 2404 | CCAAGCCATACTTTGCATCTTT | 2405 |
| PTPN13 | CTGTTGCGAGTTTAAATAGAAGTCC | 2406 | CCCTTTCTGGTGAAGATACTATGC | 2407 |
| PTPN13 | AGTCCTGAAAGGAGGAAACATG | 2408 | CAGGTTCACTAAGGTGATCTCCC | 2409 |
| PTPN13 | TTCAAAGTCTGTTGCGAGTTTAAA | 2410 | GTGATCTCCCTTTCTGGTGAAG | 2411 |
| PTPN13 | GGAGGAAACATGAATCAGACTCC | 2412 | TCACTAAGGTGATCTCCCTTTCTG | 2413 |
| PTPN13 | TAAATAGAAGTCCTGAAAGGAGGAAAC | 2414 | GAAGATACTATGCTCCATCTTTTGTGT | 2415 |
| PTPN13 | CCTGGGCAAGCATATGTTCTAG | 2416 | AAGCATCCATCCAAGTCAGC | 2417 |
| PTPN13 | CATGAATCAGACTCCTCATCCA | 2418 | TCCAGTCTTCCCATCTTCTCC | 2419 |
| PTPN13 | ATTGAAGACCCTGGGCAAG | 2420 | GGGCAACTGAACTGATAAATATGC | 2421 |
| PTPN13 | CATCCATTGAAGACCCTGGG | 2422 | CCATCTTCTCCCCACCAATA | 2423 |
| PTPN13 | AAGACCCTGGGCAAGCATAT | 2424 | CTGGCTTCAAGCATCCATCC | 2425 |
| PTPN13 | TGAATCAGACTCCTCATCCATTGAAGA | 2426 | ATCCATCCAAGTCAGCTGGTCC | 2427 |
| PTPN13 | ACAAACCGTTGCAGAGTTGG | 2428 | AATATGCCTAGGTCCAGTCTTCC | 2429 |
| PTPN13 | CCTTCTCACCAGATGTCAAGATC | 2430 | TGAACTGATAAATATGCCTAGGTCC | 2431 |
| PTPN13 | GATGCAGAATCTTTGGCAGG | 2432 | AAGTCAGCTGGTCCTCCAGG | 2433 |
| PTPN13 | CCTCTCTCTATCCACATCGGAA | 2434 | TCCCCACCAATAATTTCAAATC | 2435 |
| PTPN13 | AGATCTGATGCAGAATCTTTGGC | 2436 | CCTAGGTCCAGTCTTCCCATCTT | 2437 |
| PTPN13 | GCAGAGTTGGTGGGAAAACC | 2438 | TCCAGGGGCAACTGAACTGA | 2439 |
| PTPN13 | TGTCATTGTTAACATGGAACCC | 2440 | ATCTTCTCCCCACCAATAATTTGA | 2441 |
| PTPN13 | TCACCAGATGTCAAGATCTGATGC | 2442 | CTGGTCCTCCAGGGGCAACT | 2443 |
| PTPN13 | TGCAGAATCTTTGGCAGGAGTGAC | 2444 | GGCTTCAAGCATCCATCCAAGTCA | 2445 |
| PTPN13 | CAGAGTTGGTGGGAAAACCTTCTCAC | 2446 | CCTCCAGGGGCAACTGAACTGATAAAT | 2447 |
| PTPN13 | TGGCAGGAGTGACAAAACTTAA | 2448 | CACACTATTCACAGATATCAAACGG | 2449 |
| PTPN13 | GATGTCAAGATCTGATGCAGAATC | 2450 | CCCTCCAGACTCACACTATTCAC | 2451 |
| PTPN13 | GGAAAACCTTCTCACCAGATGTC | 2452 | TCCAGACTCACACTATTCACAGATATC | 2453 |
| PTPN13 | GAATCTTTGGCAGGAGTGACAAAACTT | 2454 | ATTGCAGCATGGTGGCTGAC | 2455 |
| PTPN13 | CCACCACAAACCGTTGCAGA | 2456 | TGGCTGACTCCCTCCAGACT | 2457 |
| PTPN13 | CCGTTGCAGAGTTGGTGGGA | 2458 | AGCATGGTGGCTGACTCCCT | 2459 |
| PTPN13 | GAACCCCCACCACAAACC | 2460 | CTGACTCCCTCCAGACTCACACT | 2461 |
| RAD52 | GCCTCAAGTCCAAGGCTTTAT | 2462 | CAGTTTCCAAGTGCATTCCC | 2463 |
| RAD52 | GTTGGTTATGGTGTTAGTGAGGG | 2464 | CAGTTTCCAAGTGCATTCCC | 2463 |
| RAD52 | GCCTCAAGTCCAAGGCTTTAT | 2462 | GCGTGGAAGCTTATTTAGTGATC | 2466 |
| RAD52 | TGGTTCATATCATGAAGATGTTGG | 2467 | TGATCTCAGGTAGTCTTTGTCCAG | 2468 |
| RAD52 | GTGTTAGTGAGGGCCTCAAGTC | 2469 | GTCCAGAATACAGTTTCCAAGTGC | 2470 |
| RAD52 | TCATGAAGATGTTGGTTATGGTG | 2471 | TCAGGTAGTCTTTGTCCAGAATACAG | 2472 |
| RAD52 | TGAGGGCCTCAAGTCCAAGG | 2473 | AGTCTTTGTCCAGAATACAGTTTCCAA | 2474 |
| RAD52 | GGTTATGGTGTTAGTGAGGGCCTCAAG | 2475 | AATACAGTTTCCAAGTGCATTCCCAAA | 2476 |
| RAD52 | CAAGGCTTTATCTTTGGAGAAGG | 2477 | GGCAGCTGTTGTATCTTGCC | 2478 |
| RAD52 | AGAAGGCAAGGAAGGAGGC | 2479 | TCCACAGACGGTTCAAGATCT | 2480 |
| RAD52 | GTGACAGACGGGCTGAAGC | 2481 | TGTATCTTGCCTCCTCCACAG | 2482 |
| RAD52 | CAAGTCCAAGGCTTTATCTTTGG | 2483 | AGCTGTTGTATCTTGCCTCCTCC | 2484 |
| RAD52 | AAGGAAGGAGGCGGTGACAG | 2485 | ATGTTCGGTCGGCAGCTGTT | 2486 |
| RAD52 | GCTGAAGCGAGCCCTCAG | 2487 | CGGTATCACAGCATGGCTG | 2488 |
| RAD52 | AGACGGGCTGAAGCGAGCC | 2489 | TGGGTCTGGAAGGGGAGGTC | 2490 |
| RAD52 | AGGCGGTGACAGACGGGCT | 2491 | AGCATGGCTGGGTCTGGAAG | 2492 |
| RAD52 | ATTTGTGAGGGTCCAGCTGA | 2493 | GTTAAATCCACTTCAAGAGGCAA | 2494 |
| RAD52 | GAGTCTGTGCATTTGTGAGGG | 2495 | CTTGTCTCTTCGCTTTAGTTAAATCC | 2496 |
| RAD52 | ACGTGGGAGTCTGTGCATTT | 2497 | TCGCTTTAGTTAAATCCACTTCAAG | 2498 |
| RAD52 | AGTTCTACGTGGGAGTCTGTGC | 2499 | GGTTCAAGATCTTGTCTCTTCGC | 2500 |
| RAD52 | CTGTGCATTTGTGAGGGTCCAGC | 2501 | TGCCTCCTCCACAGACGGTT | 2502 |
| RAD52 | AATGGCAAGTTCTACGTGGG | 2503 | TCAAGATCTTGTCTCTTCGCTTTAGTT | 2504 |
| RAD52 | GATCAGTGGGTGGTAGGAGAAG | 2505 | AGCTGTGGGTGTCCCAGG | 2506 |
| RAD52 | CGGAAGGATCAGTGGGTGGTA | 2507 | AGGGCCATGTTCGGTCGG | 2508 |
| RAD52 | ATGGAGTAGACCTGCTGCCC | 2509 | GTGTCCCAGGGCCATGTTC | 2510 |
| RAD52 | CTGCCCGGAAGGATCAGT | 2511 | GCTGCAGCTGTGGGTGTC | 2512 |
| RAD52 | CAAGTCCAAGGCTTTATCTTTGG | 2483 | TGATCTCAGGTAGTCTTTGTCCAG | 2468 |
| RAD52 | CAAGGCTTTATCTTTGGAGAAGG | 2477 | TCAGGTAGTCTTTGTCCAGAATACAG | 2472 |
| RAD52 | GTGACAGACGGGCTGAAGC | 2481 | GTTAAATCCACTTCAAGAGGCAA | 2494 |
| RAD52 | GCTGAAGCGAGCCCTCAG | 2487 | TCGCTTTAGTTAAATCCACTTCAAG | 2498 |
| RAD52 | AGGAGGCGGTGACAGACG | 2521 | TGTCTCTTCGCTTTAGTTAAATCCA | 2522 |
| RAD52 | GACGGGCTGAAGCGAGCC | 2523 | ACGGTTCAAGATCTTGTCTCTTCG | 2524 |
| SHMT1 | GAACACTGCCATGTGGTGAC | 2525 | CATAGCTTGCTTCAGTGCCA | 2526 |
| SHMT1 | AGATTGCAGATGAGAACGGG | 2527 | CATAGCTTGCTTCAGTGCCA | 2526 |
| SHMT1 | GAACACTGCCATGTGGTGAC | 2525 | TATTTTGTAGCCCAGCTCCG | 2530 |
| SHMT1 | ACTCCCGAAACCTGGAATATG | 2531 | CTTCAGTGCCACAGCAACC | 2532 |
| SHMT1 | TGACCACCACCACTCACAAG | 2533 | TCAGACAGAGCCCTGCAGTT | 2534 |
| SHMT1 | GTATCTCATGGCGGACATGG | 2535 | TTTAAATTCCAGAGTCATAGCTTGC | 2536 |
| SHMT1 | GCTACGGAAGATTGCAGATGAG | 2537 | CCTGGTGTTGATAAACTTTAAATTCC | 2538 |
| SHMT1 | CCCATTTGAACACTGCCATG | 2539 | TGTGACTATTTTGTAGCCCAGC | 2540 |
| SHMT1 | ATGAGAACGGGGCGTATCTC | 2541 | CCAGAGTCATAGCTTGCTTCAGT | 2542 |
| SHMT1 | TGGCATGATCTTCTACAGGAAAG | 2543 | GTAGCCCAGCTCCGTCAGG | 2544 |
| SHMT1 | GACATGGCTCACATCAGCG | 2545 | GTCAGGGCCTCAGACAGAGC | 2546 |
| SHMT1 | CACCACTCACAAGACCCTGC | 2547 | CAGTTGGCCACCACCTGGT | 2548 |
| SHMT1 | AATATGCCCGGCTACGGAAG | 2549 | CCACCACCTGGTGTTGATAAAC | 2550 |
| SHMT1 | TGCCCTCCCCATTTGAACAC | 2551 | GACTATTTTGTAGCCCAGCTCCGTCAG | 2552 |
| SHMT1 | CTGCTACTCCCGAAACCTGG | 2553 | AGCCCTGCAGTTGGCCAC | 2554 |
| SHMT1 | AACGGGGCGTATCTCATGGC | 2555 | AGCTTGCTTCAGTGCCACAGCAA | 2556 |
| SHMT1 | TGCCGAGCTGGCATGATCTT | 2557 | GCTCCGTCAGGGCCTCAGAC | 2558 |
| SHMT1 | ATGGCGGACATGGCTCACAT | 2559 | GAGTCATAGCTTGCTTCAGTGCCACAG | 2560 |
| SHMT1 | TTGCAGATGAGAACGGGGCGTAT | 2561 | AGTTGGCCACCACCTGGTGTTGAT | 2562 |
| SHMT1 | CAAGACCCTGCGAGGCTG | 2563 | GGATCAAATGGTTGTCAGAACC | 2564 |
| SHMT1 | CCGAGCTGGCATGATCTTCTACAG | 2565 | CCATCTGTGCCTTTGGAACG | 2566 |
| SHMT1 | GCCATGTGGTGACCACCA | 2567 | ACAGGCTTCTAGCACCTTCTCA | 2568 |
| SHMT1 | CACTCACAAGACCCTGCGAGGCT | 2569 | TCTGTGCCTTTGGAACGGAGATC | 2570 |
| SHMT1 | ACATCAGCGGGCTGGTGG | 2571 | TGGAACGGAGATCCACAAGG | 2572 |
| SHMT1 | GAGGCTGCCGAGCTGGCAT | 2573 | GAACGGAGATCCACAAGGATCAAA | 2574 |
| SHMT1 | CGTGGTGCCCTCCCCATTT | 2575 | GAGATCCACAAGGATCAAATGGTTGT | 2576 |
| SHMT1 | GCTGGCGTGGTGCCCTCC | 2577 | GGCTTCTAGCACCTTCTCAGCCCTTC | 2578 |
| SHMT1 | GGCTCACATCAGCGGGCTG | 2579 | CCTTCTCAGCCCTTCCACCAT | 2580 |
| SHMT1 | AAACCTGGAATATGCCCGG | 2581 | CTTCCACCATCTGTGCCTTT | 2582 |
| SHMT1 | GCCCGGCTACGGAAGATTGC | 2583 | TCAGCCCTTCCACCATCTGTGC | 2584 |
| SLIT2 | GGCAAGTTTCAACCATATGCC | 2585 | GGAGCCATAAATGACTGGTGAC | 2586 |
| SLIT2 | AAACAACCTGTATTGTGACTGCC | 2587 | GGAGCCATAAATGACTGGTGAC | 2586 |
| SLIT2 | CCTCGGGTTGGTCTGTACAC | 2588 | TGGTCTCTGGAAGATTTGTGG | 2589 |
| SLIT2 | TCGACTGCATTCAAACAACC | 2590 | TGAGACCTTTCCCACGACAG | 2591 |
| SLIT2 | CCACCTGAGAGGCCATAATG | 2592 | CCCACGACAGTCTACGATATTG | 2593 |
| SLIT2 | GCCATAATGTAGCCGAGGTTC | 2594 | TTTCTGTGATGGTCTCTGGAAG | 2595 |
| SLIT2 | GACTGGCTTCGCCAAAGG | 2596 | CGATATTGTTGCTACAGGTACAGG | 2597 |
| SLIT2 | AAACGAGAATTTGTCTGCAGTG | 2598 | AAGATTTGTGGGGATCTCAGTG | 2599 |
| SLIT2 | GGGTTGGTCTGTACACTCAGTG | 2600 | TGCAAAACACTACAAGAAGGAGC | 2601 |
| SLIT2 | CTGCATTCAAACAACCTGTATTG | 2602 | CAAGAAGGAGCCATAAATGACTG | 2603 |
| SLIT2 | TGTATTGTGACTGCCACCTGG | 2604 | GGGATCTCAGTGAGACCTTTCC | 2605 |
| SLIT2 | TGAGAGGCCATAATGTAGCCG | 2606 | ACCTTTCCCACGACAGTCTACG | 2607 |
| SLIT2 | TGTACACTCAGTGTATGGGCCC | 2608 | CTACAGGTACAGGCGGCAGG | 2609 |
| SLIT2 | AGCCGAGGTTCAAAAACGAG | 2610 | CTCTGGAAGATTTGTGGGGATCT | 2611 |
| SLIT2 | GGCTCTCCGACTGGCTTC | 2612 | ACAGTCTACGATATTGTTGCTACAGG | 2613 |
| SLIT2 | AAAGGCCTCGGGTTGGTCT | 2614 | AGGGCAGTGCAAAACACTACA | 2615 |
| SLIT2 | TCTCCGACTGGCTTCGCCAA | 2616 | TCTGTGATGGTCTCTGGAAGATTTGTG | 2617 |
| SLIT2 | GCTTCGCCAAAGGCCTCG | 2618 | GTACAGGCGGCAGGGCAGTG | 2619 |
| SLIT2 | CCCTCCCACCTGAGAGGC | 2620 | TCTCAGTGAGACCTTTCCCACGAC | 2621 |
| SLIT2 | CCGAGGTTCAAAAACGAGAATTTG | 2622 | TTTGTGGGGATCTCAGTGAGACCT | 2623 |
| SLIT2 | CACCTGGCCTGGCTCTCC | 2624 | AACACTACAAGAAGGAGCCATAAATG | 2625 |
| SLIT2 | TAATGTAGCCGAGGTTCAAAAAC | 2626 | TGATTGTGTTCTGTTCCAAACG | 2627 |
| SLIT2 | GGCCTGGCTCTCCGACTG | 2628 | AGGGATGACTTTGATTGTGTTCTG | 2629 |
| SLIT2 | AGTGTATGGGCCCCTCCCAC | 2630 | ATGACTTTGATTGTGTTCTGTTCCAAA | 2631 |
| SLIT2 | GTTGGTCTGTACACTCAGTGTATGGGC | 2632 | TGAGAAAGCTCCAGGAGGGAT | 2633 |
| SLIT2 | GGTTCAAAAACGAGAATTTGTCTGCAG | 2634 | GAAAGCTCCAGGAGGGATGACTTT | 2635 |
| SLIT2 | CTCCCACCTGAGAGGCCATAATGTAGC | 2636 | CTCCAGGAGGGATGACTTTGATTGTG | 2637 |
| SLIT2 | TGACTGCCACCTGGCCTGG | 2638 | TTGGAAAGCATCTGGTGCAAG | 2639 |
| SLIT2 | ATGGGCCCCTCCCACCTGAG | 2640 | GGAAAGCATCTGGTGCAAGTTCAGAG | 2641 |
| SLIT2 | GGCAAGTTTCAACCATATGCC | 2585 | TTATATGGTGAGAAAGCTCCAGG | 2643 |
| SLIT2 | TCAACCATATGCCTAAACTTAGGAC | 2644 | TCTAAGGTTTTTATATGGTGAGAAAGC | 2645 |
| SLIT2 | TTTCTGTGGCAAGTTTCAACC | 2646 | GAGATCTGATTATTGCTCAGGTCA | 2647 |
| SLIT2 | ACTAGACTTTCTGTGGCAAGTTTCA | 2648 | TCTGGTGCAAGTTCAGAGATCTGA | 2649 |
| SLIT2 | CAACATTACTAGACTTTCTGTGGCA | 2650 | GTAGTCCTTGGAAAGCATCTGG | 2651 |
| STIM1 | ATCGAGATCCTCTGTGGCTTC | 2652 | GAACACTGCTCTGCAGGCTAG | 2653 |
| STIM1 | TGTGGCTTCCAGATTGTCAAC | 2654 | ATGCTGTGGCTCCGTCAG | 2655 |
| STIM1 | CAACCCTGCTCACTTCATCA | 2656 | CTCTGAGATCCCAGGCCAT | 2657 |
| STIM1 | AGATTGTCAACAACCCTGGC | 2658 | GCTGCCGAACACTGCTCT | 2659 |
| STIM1 | ATCCACTCACTGGTGGCTGC | 2660 | AGATCCCAGGCCATGCTGTG | 2661 |
| STIM1 | AAGCACTGAGCGAGGTGACA | 2662 | AGGCCATGCTGTGGCTCC | 2663 |
| STIM1 | GCTTCCAGATTGTCAACAACCCT | 2664 | CAGGCGCTGCCGAACACT | 2665 |
| STIM1 | ACCGCTGGCAACAGATCGAG | 2666 | GTGGCTCCGTCAGGCGCT | 2667 |
| STIM1 | GACGTGGATGACATGGATGA | 2668 | AATCGGAATGGGTCAAATCC | 2669 |
| STIM1 | TTGTGTCTCCCTTGTCCATG | 2670 | AGCGCCAGTAATGCTTCTT | 2671 |
| STIM1 | ACATGGATGAGGAGATTGTGTCT | 2672 | AAGTCATGGCATTGAGAGCC | 2673 |
| STIM1 | TTCATCATGACTGACGACGTG | 2674 | GCAGTTTCTCCACCAGAGACC | 2675 |
| STIM1 | AGCTGGATGGGCAGTACACG | 2676 | GTCACTCATGTGGAGGGAGG | 2677 |
| STIM1 | GAGGAGATTGTGTCTCCCTTGT | 2678 | AGTAATGCCTTCTTGGCCAG | 2679 |
| STIM1 | CCTCAACATAGACCCCAGCT | 2680 | ATTGAGAGCCTCGTCTGCAG | 2681 |
| STIM1 | GCTCACTTCATCATGACTGACG | 2682 | GAGGACTCCGAATCGGAATG | 2683 |
| STIM1 | ATGACTGACGACGTGGATGAC | 2684 | GCTCATCTGAGGAGGTTTGG | 2685 |
| STIM1 | TGGATGACATGGATGAGGAGAT | 2686 | CTGCCATTGGAAGTCATGG | 2687 |
| STIM1 | AACCCTGGCATCCACTCACT | 2688 | GCTGGCGGTCACTCATGT | 2689 |
| STIM1 | AGTACACGCCCCAACCCT | 2690 | CATTGGAAGTCATGGCATTG | 2691 |
| STIM1 | GCTGCCCTCAACATAGACCC | 2692 | AGCACGGCTCATCTGAGGAG | 2693 |
| STIM1 | ACATAGACCCCAGCTGGATG | 2694 | ATGGCATTGAGAGCCTCGTC | 2695 |
| STIM1 | TCAACAACCCTGGCATCCAC | 2696 | CTCCGAATCGGAATGGGTCA | 2697 |
| STIM1 | ATCCTCTGTGGCTTCCAGATT | 2698 | GGAGGGAGGACTCCGAATC | 2699 |
| STIM1 | ACTGACGACGTGGATGACATGGAT | 2700 | CACCAGAGACCCTGGGTGGAC | 2701 |
| STIM1 | ACTGGTGGCTGCCCTCAACATA | 2702 | GTCTGCAGCACGGCTCATCT | 2703 |
| STIM1 | GAGATTGTGTCTCCCTTGTCCATGCAG | 2704 | CTCGATCAGCCGGTGGCTG | 2705 |
| STIM1 | GCAACAGATCGAGATCCTCTGTGG | 2706 | CACACGCTGGCGGTCACTC | 2707 |
| STIM1 | CAACCCTGCTCACTTCATCATGACTGA | 2708 | CGGTGGCTGCCATTGGAAGT | 2709 |
| STIM1 | ATGGGCAGTACACGCCCCAA | 2710 | GAGCCTCGTCTGCAGCACGG | 2711 |
| STIM1 | ACGCCCCAACCCTGCTCACT | 2712 | ATCAGCCGGTGGCTGCCATT | 2713 |
| STIM1 | ACCCCAGCTGGATGGGCAGT | 2714 | AGGAGGTTTGGGGGCCACAC | 2715 |
| SYK | CACAACTTCCAGGTTCCCAT | 2716 | CCCAGTTCTTTGTCTTCCAGC | 2717 |
| SYK | CACAACTTCCAGGTTCCCAT | 2716 | CTTTGTCTGCAGCCCAGG | 2718 |
| SYK | GAAATGTTAATTTTGGAGGCCG | 2719 | CCAGGGTGCAAGTTCTGG | 2720 |
| SYK | AATTTTGGAGGCCGTCCACAAC | 2721 | CTGCAGCCCAGGGTGCAAGT | 2722 |
| SYK | CCGTCCACAACTTCCAGGTT | 2723 | TTCTGGCTCATACGGATTGAA | 2724 |
| SYK | CTTCCAGGTTCCCATCCTGC | 2725 | AGGGTGCAAGTTCTGGCTCATA | 2726 |
| SYK | CGAGCATTATTCTTATAAAGCAGATG | 2727 | ATGACACAGTACTCTCTTGCCG | 2728 |
| SYK | GAGTTCTTACTGTCCCATGTCAAA | 2729 | GCTCATACGGATTGAATGACAC | 2730 |
| SYK | GGTTTGTTAAGAGTTCTTACTGTCCC | 2731 | TACTCTCTTGCCGGTTCCCTT | 2732 |
| SYK | GACAACAACGGCTCCTACGC | 2733 | TGCAAGTTCTGGCTCATACGGATT | 2734 |
| SYK | TGCACGAAGGGAAGGTGCTG | 2735 | GACACAGTACTCTCTTGCCGGTTCCCT | 2736 |
| SYK | CCAGAGACAACAACGGCTCC | 2737 | TTCCCTTGGGCAGGGGAG | 2738 |
| SYK | TCCTACGCCCTGTGCCTGCT | 2739 | GCCGGTTCCCTTGGGCAG | 2740 |
| SYK | AGCAGATGGTTTGTTAAGAGTTCTTAC | 2741 | CCCAGTTCTTTGTCTTCCAGC | 2717 |
| SYK | CGAGGGAAAGAAGTTCGACA | 2743 | TCGTACACCTCTGTGTCCATG | 2744 |
| SYK | CACTATCGATCGACAAAGACA | 2745 | ATGGGTAGGGCTTCTCTCTGG | 2746 |
| SYK | CAAAGACAAGACAGGGAAGCTC | 2747 | GTAGGGGCTCTCGTACACCTC | 2748 |
| SYK | AGAAGTTCGACACGCTCTGG | 2749 | AGGTAAACCTCCTTGGGCCT | 2750 |
| SYK | AAGACAGGGAAGCTCTCCATC | 2751 | CTCTGTGTCCATGGGTAGGG | 2752 |
| SYK | GCATCGACAAAGACAAGACAGG | 2753 | TGTCCATGGGTAGGGCTTCT | 2754 |
| SYK | AGGGAAAGAAGTTCGACACGCTCT | 2755 | TCCTTGGGCCTGATCTCCTC | 2756 |
| SYK | GAAGCTCTCCATCCCCGAG | 2757 | GGGCTCTCGTACACCTCTGTGTC | 2758 |
| SYK | ATCCCCGAGGGAAAGAAGTT | 2759 | TCGGTCCAGGTAAACCTCCT | 2760 |
| SYK | CTGTGCCTGCTGCACGAAGG | 2761 | CTGTGTCCATGGGTAGGGCTTCTCTCT | 2762 |
| SYK | TCTCCATCCCCGAGGGAAAG | 2763 | TAAACCTCCTTGGGCCTGATCTC | 2764 |
| SYK | TGCTGCACTATCGCATCGAC | 2765 | GGTCCGCGTAGGGGCTCTC | 2766 |
| SYK | AAGGGAAGGTGCTGCACTATC | 2767 | CTGATCTCCTCGGGGTCC | 2768 |
| SYK | CCTGCTGCACGAAGGGAAGG | 2769 | TCCTCGGGGTCCGCGTAGG | 2770 |
| SYNE2 | CTCACGAAGAGGACGAGGAG | 2771 | TTGCTTGTAGTGATGCTCGG | 2772 |
| SYNE2 | GAACCGTCATCTCCTCAGTCC | 2773 | TCCTGTCACCTTCATTTGC | 2774 |
| SYNE2 | TCCTCAGTCCCTGTGTCATCTA | 2775 | CACCTTCCATTTGCTTGTAGTG | 2776 |
| SYNE2 | GGCCTCTGAGAATGAAACAGAC | 2777 | GCCATCCGAAATGGATTTAC | 2778 |
| SYNE2 | CTGATTCTTGGCGTAAACGG | 2779 | GAACAGGTGGAACATTCCTGTC | 2780 |
| SYNE2 | GAATGAAACAGACATGGAAGACC | 2781 | GTAGTGATGCTCGGGACAGG | 2782 |
| SYNE2 | CCTGTGTCATCTAGTGGCCC | 2783 | TGGTTTATAAGGGGTGCTGG | 2784 |
| SYNE2 | AAGACCCCAGAGAAATCCAGAC | 2785 | GAACATTCCTGTCACCTTCCA | 2786 |
| SYNE2 | GCTTGGAAGATGAAAAGGAGG | 2787 | AAGGGCTGTCGGGAACAT | 2788 |
| SYNE2 | GAAATCCAGACTGATTCTTGGC | 2789 | TTCCATTTGCTTGTAGTGATGCTC | 2790 |
| SYNE2 | AGAGAGCGAGGAACCGTCAT | 2791 | ATAGGGTGGTTTATAAGGGGTGC | 2792 |
| SYNE2 | GTCATCTCCTCAGTCCCTGTGT | 2793 | GGGAACATGCCACGAGTG | 2794 |
| SYNE2 | GTAAACGGGGAGAGAGCGAG | 2795 | CTGTCGGGAACATGCCAC | 2796 |
| SYNE2 | TGTCAGCGTGGACTCCATC | 2797 | CGGGACAGGAAGGGCTGT | 2798 |
| SYNE2 | CCCAGAGAAATCCAGACTGATTC | 2799 | GAGTGGCCATCCGAAATG | 2800 |
| SYNE2 | GACCACACAGGCGACGTG | 2801 | ATGCTCGGGACAGGAAGGG | 2802 |
| SYNE2 | GGCCCATACTACAGCGCACT | 2803 | AGGGGGAACAGGTGGAACAT | 2804 |
| SYNE2 | GGGCTCCTCCTCTCACGAAG | 2805 | ATTCCTGTCACCTTCCATTTGCTTGTA | 2806 |
| SYNE2 | CTTGGCGTAAACGGGGAGAG | 2807 | ACAGGAAGGGCTGTCGGGAA | 2808 |
| SYNE2 | AGGACGAGGAGGGCCCATACTA | 2809 | TATAAGGGGTGCTGGACGCAG | 2810 |
| SYNE2 | GCGAGGAACCGTCATCTCCT | 2811 | CTGGACGCAGGGGGAACAG | 2812 |
| SYNE2 | ATCCAGACTGATTCTTGGCGTAAACG | 2813 | ATTTGCTTGTAGTGATGCTCGGGACAG | 2814 |
| SYNE2 | CTCCTCTCACGAAGAGGACG | 2815 | CGTGCCTGGAGGTAATAGTAGC | 2816 |
| SYNE2 | CTGCGAGACCCCTGTCAG | 2817 | CTTCTTTGCCACCATCCGT | 2818 |
| SYNE2 | CTGGAGTGGGACCACACAG | 2819 | GTGGGTTGCCATTCAGGACT | 2820 |
| SYNE2 | AGACCCCTGTCAGCGTGGAC | 2821 | GTCTTCCTGCTGTGGGTTGC | 2822 |
| SYNE2 | ACTCCATCCCCCTGGAGTG | 2823 | CTGCTGCTCTGTGATACCGG | 2824 |
| SYNE2 | CACGAGCGGTCTGGCTGC | 2825 | ACCATCCGTGCCTGGAGGTAAT | 2826 |
| SYNE2 | AGTGGGACCACACAGGCGAC | 2827 | CGGGCCTTCTTTGCCACCAT | 2828 |
| SYNE2 | GAGGAGGGCCCATACTACAGCGC | 2829 | TTTGCCACCATCCGTGCCTG | 2830 |
| SYNE2 | AGCGTGGACTCCATCCCCCT | 2831 | ATTCAGGACTCGCGGGCCTT | 2832 |
| SYNE2 | GGTCTGGCTGCGAGACCC | 2833 | CTGCTGTGGGTTGCCATTC | 2834 |
| SYNE2 | ATCCCCCTGGAGTGGGACC | 2835 | GCTCTGTGATACCGGCCAGT | 2836 |
| SYNE2 | CAGGGCACGAGCGGTCTG | 2837 | TTGCCATTCAGGACTCGCGG | 2838 |
| SYNE2 | GTCATCTAGTGGCCCCAGGG | 2839 | ACTCGCGGGCCTTCTTTG | 2840 |
| SYNE2 | TAGTGGCCCCAGGGCACGAG | 2841 | GCCAGTCCCCCGTCTTCCTG | 2842 |
| SYNE2 | CGGGGAGAGAGCGAGGAACC | 2843 | TCCCCCGTCTTCCTGCTGTG | 2844 |
| TOPBP1 | TGCCCAATTCTTCAACTCCT | 2845 | TGTAGGCTCCAGTTTGCTGTT | 2846 |
| TOPBP1 | GTATGAGTGTGCCAAGAGATGG | 2847 | AATCTTCAGGTGCTTGAAATGC | 2848 |
| TOPBP1 | TTCAACTCCTACCAGCCAGATC | 2849 | CTTGAAATGCACTGACATCCAG | 2850 |
| TOPBP1 | CAAGACAGAACCTAGACCAGAAGC | 2851 | TTGATTCACTTACGCAACTTGC | 2852 |
| TOPBP1 | CCAGCCAGATCAACACAATTG | 2853 | CCGACAACCATCTAATAAATCTTCAG | 2854 |
| TOPBP1 | TGCCAAGAGATGGAATGTACAC | 2855 | CCAGTTTGCTGTTAAGTGAATTACA | 2856 |
| TOPBP1 | GACCAGAAGCAAAGACTATGCC | 2857 | CAGGTGCTTGAAATGCACTGAC | 2858 |
| TOPBP1 | TGGAATGTACACTGTGTGACCAC | 2859 | CGCAACTTGCATTTATGTTGG | 2860 |
| TOPBP1 | CCAATTCTTCAACTCCTACCAGC | 2861 | TGCACTGACATCCAGATTTTCTAG | 2862 |
| TOPBP1 | AGACTATGCCCAATTCTTCAACTC | 2863 | TTTCAAGTGTAGGCTCCAGTTTG | 2864 |
| TOPBP1 | GTCAGAAGTATGAGTGTGCCAAG | 2865 | TTGCATTTATGTTGGAAATATTGC | 2866 |
| TOPBP1 | TGTCAGGATGAATCCATATACAAGAC | 2867 | CCATCTAATAAATCTTCAGGTGCTTG | 2868 |
| TOPBP1 | TGAGAAAGGTTTTTGTCAGGATG | 2869 | TTCTAGATTTTCAAGTGTAGGCTCC | 2870 |
| TOPBP1 | CAAGAGATGGAATGTACACTGTGTGA | 2871 | CACTTACGCAACTTGCATTTATG | 2872 |
| TOPBP1 | AGAACCTAGACCAGAAGCAAAGAC | 2873 | TGCTGTTAAGTGAATTACATATTGATT | 2874 |
| TOPBP1 | ATGAGTGTGCCAAGAGATGGAATGTAC | 2875 | GTAGGCTCCAGTTTGCTGTTAAGTGAA | 2876 |
| TOPBP1 | GTGTGACCACACAGTGGTTTT | 2877 | TTATGTTGGAAATATTGCTGACAT | 2878 |
| TOPBP1 | CTCCTACCAGCCAGATCAACACA | 2879 | AAACGAACTCCACCTCCACTG | 2880 |
| TOPBP1 | TTTGACAGTATTGAGAAAGGTTTTTG | 2881 | CATGAGTTACATCTTCATTTAGCTGG | 2882 |
| TOPBP1 | GGTTTTTGTCAGGATGAATCCA | 2883 | CCACCTCCACTGTTAATAAGTCTTC | 2884 |
| TOPBP1 | ACACCTCATTGTGCAAGAACC | 2885 | CTGCCACTAAAACCGCAAAG | 2886 |
| TOPBP1 | TGAATGTACACACCTCATTGTGC | 2887 | GCTTTCTGCCACTAAAACCG | 2888 |
| TOPBP1 | AGCATGGAGGTCAATACATGG | 2889 | TCCACTGTTAATAAGTCTTCTCAGTTT | 2890 |
| TOPBP1 | CATGGAGGTCAATACATGGGACAATT | 2891 | GCTTTCTGCCACTAAAACCGCAAAGAT | 2892 |
| TOPBP1 | TCAATACATGGGACAATTGAAAAT | 2893 | CGAACTCCACCTCCACTGTTAATA | 2894 |
| TSSC4 | TTGGCTGTCCAATCACACTC | 2895 | ATGCCTCTCAGATGGAATGG | 2896 |
| TSSC4 | ATGGCTGAGGCAGGAACAG | 2897 | CTCCGTTGTCACTCATGCTG | 2898 |
| TSSC4 | GACGCATGGCTGAGGCAG | 2899 | ACAGAGGATGGAGCCCGTCT | 2900 |
| TSSC4 | CTGGGGACGCATGGCTGAG | 2901 | GGCCTGAGGGCGCTAGGG | 2902 |
| TSSC4 | CAATCACACTCCAGTGTCAACC | 2903 | CTCCAGGCAGTCAAAGATGTC | 2904 |
| TSSC4 | ATCAGGGCTCCGTCCACTTG | 2905 | GTCAAAGATGTCACGGCTGC | 2906 |
| TSSC4 | CGCTGAGGACCTTCATCAGG | 2907 | AGCTCATGCCTCTCAGATGG | 2908 |
| TSSC4 | CAGTGTCAACCACTGGCACC | 2909 | TGGGAGAAGGTGGAGCTCAT | 2910 |
| TSSC4 | AGGCCTGAGACGACCACG | 2911 | TCAGATGGAATGGCTGCAC | 2912 |
| TSSC4 | GCTGTCCAATCACACTCCAGTGT | 2913 | AAGGTGGAGCTCATGCCTCT | 2914 |
| TSSC4 | AGGACCTTCATCAGGGCTCC | 2915 | CACCGTGGCTGGGAGGAG | 2916 |
| TSSC4 | CACCCAGCAGCCAAGAGAG | 2917 | GGGCCACAGAGGATGGAG | 2918 |
| TSSC4 | CACTTGGCCCGCTTGGCTGT | 2919 | ATGGAATGGCTGCACCGTGG | 2920 |
| TSSC4 | AACCACTGGCACCCAGCAGC | 2921 | CAGGCAGTCAAAGATGTCACGGCT | 2922 |
| TSSC4 | CTGTGCCGCTGAGGACCTTC | 2923 | TGCGCTGGGAGAAGGTGGAG | 2924 |
| TSSC4 | GCCCGCTTGGCTGTCCAATC | 2925 | AGAAGGTGGAGCTCATGCCTCTCAGAT | 2926 |
| TSSC4 | ACCTTCATCAGGGCTCCGTCCAC | 2927 | AGATGTCACGGCTGCGCTGG | 2928 |
| TSSC4 | ACACTCCAGTGTCAACCACTGGC | 2929 | ACGGCTGCGCTGGGAGAAG | 2930 |
| TSSC4 | CCGTCCACTTGGCCCGCTT | 2931 | GCCCCCTCCAGGCAGTCAAA | 2932 |
| TSSC4 | CACGCCTGTGCCGCTGAG | 2933 | ATGGAGCCCGTCTGGCCG | 2934 |
| TSSC4 | AGACGACCACGCCTGTGC | 2935 | TGGTGTGGGCCACAGAGGAT | 2936 |
| TSSC4 | ACTCCGAGGCCTGAGACGAC | 2937 | TCATGCTGGTGTGGGCCAC | 2938 |
| TUBA1 | GACTCAACGTGAGACGCACC | 2939 | CTCTTTCCCAGTGATGAGCTG | 2940 |
| TUBA1 | GACTCAACGTGAGACGCACC | 2939 | CCTTGCCAATGGTATAGTGACC | 2941 |
| TUBA1 | ACTGCAGCTAGCGCAGTTCT | 2942 | CTCTTTCCCAGTGATGAGCTG | 2940 |
| TUBA1 | ACCTGTCACCCCGACTCAAC | 2943 | GGTCAATGATCTCCTTGCCA | 2944 |
| TUBA1 | CTAGCGCAGTTCTCACTGAGAC | 2945 | GTTGTTGGCAGCATCCTCTT | 2946 |
| TUBA1 | TCTCACTGAGACCTGTCACCC | 2947 | TGACCACGGGCATAGTTGTT | 2948 |
| TUBA1 | ACCCCGACTCAACGTGAGAC | 2949 | GGCATAGTTGTTGGCAGCAT | 2950 |
| TUBA1 | GTGCGGCACTGCAGCTAG | 2951 | CAGCATCCTCTTTCCCAGTG | 2952 |
| TUBA1 | ATAAGGGCGGTGCGGCACT | 2953 | TGGGTGGAAGAGCTGTCGGTAT | 2954 |
| TUBA1 | ACCGCCCGGACTCACCATG | 2955 | CCGATCCAGCACTGGGTCAAT | 2956 |
| TUBA1 | ACTGAGACCTGTCACCCCGACTC | 2957 | CAATGGTATAGTGACCACGGGC | 2958 |
| TUBA1 | AGACGCACCGCCCGGACT | 2959 | TCCAGCACTGGGTCAATGATCTC | 2960 |
| UTRN | CAAACACCCTCGACTTGGTT | 2961 | TGGCAATACTGCTGGATGAG | 2962 |
| UTRN | CAAACACCCTCGACTTGGTT | 2961 | TGTGGCATATTGTTCTATTCTTGAA | 2963 |
| UTRN | TGGGGAAGATGTACGAGACTTC | 2964 | ACAGTTGAGGAGATTGTGAGGG | 2965 |
| UTRN | CAGGTCGAAGAAGTACTTTGCC | 2966 | TTCTTGAATGGGTGTCATCATG | 2967 |
| UTRN | CAACATCTGGGGAAGATGTACG | 2968 | TTGTTCTATTCTTGAATGGGTGTC | 2969 |
| UTRN | AAGAACAAGTTCAGGTCGAAGAAG | 2970 | ATCATGAAACAGTTGAGGAGATTG | 2971 |
| UTRN | GGTACTTAAGAACAAGTTCAGGTCG | 2972 | GAATGGGTGTCATCATGAAACAG | 2973 |
| UTRN | TACTTTGCCAAACACCCTCG | 2974 | GACCCATTAGTCCTTTCCATCTG | 2975 |
| UTRN | GACTTGGTTACCTGCCTGTCC | 2976 | ACACTTCCTGTGGTGGAGCT | 2977 |
| UTRN | TCCAGACAGTTCTTGAAGGTGAC | 2978 | CAGTGAGAAAAGACCCATTAGTCC | 2979 |
| UTRN | CGAAGAAGTACTTTGCCAAACAC | 2980 | TGGTGGAGCTGCTATCAGTG | 2981 |
| UTRN | ACCCTCGACTTGGTTACCTGC | 2982 | AGTCCTTTCCATCTGGGCCA | 2983 |
| UTRN | CGAGACTTCACAAAGGTACTTAAGAA | 2984 | GCTGCTATCAGTGAGAAAAGACC | 2985 |
| UTRN | CTTTGCCAAACACCCTCGACTTGG | 2986 | TGGTGGAGCTGCTATCAGTGAGAAAAG | 2987 |
| UTRN | AGAAGTACTTTGCCAAACACCCTCGAC | 2988 | ACTTCCTGTGGTGGAGCTGCTATCAGT | 2989 |
| UTRN | TCACAAAGGTACTTAAGAACAAGTTCA | 2990 | TGGCAATACTGCTGGATGAG | 2962 |
| UTRN | ACAAGTTCAGGTCGAAGAAGTACTTTG | 2992 | TCCGAGTGTTTGGCAATACTG | 2993 |
| UTRN | CACAAATTACATTACCCAATGGTG | 2994 | GACTGTCCTCCGAGTGTTTGG | 2995 |
| UTRN | CCCAATGGTGGAATATTGTATACC | 2996 | ATACTGCTGGATGAGGGCGT | 2997 |
| UTRN | GAGTTGTTTCTTTTCGGGTCG | 2998 | GAGGGCGTGCTCGTCTTC | 2999 |
| UTRN | GCAAAAGGTCACAAATTACATTACC | 3000 | AGTGTTTGGCAATACTGCTGGAT | 3001 |
| UTRN | TTTTCGGGTCGAACAGCAAAAG | 3002 | CTGGATGAGGGCGTGCTCGT | 3003 |
| UTRN | ACATTACCCAATGGTGGAATATTG | 3004 | ACTGGGGACTCTCCTCCGAG | 3005 |
| UTRN | TCGAACAGCAAAAGGTCACA | 3006 | CTGGCTCACTGGGGACTCTC | 3007 |
| UTRN | TCGAACAGCAAAAGGTCACAAATTACA | 3008 | ACTCTCCTCCGAGTGTTTGGCAATACT | 3009 |
| UTRN | TGTTTCTTTTCGGGTCGAACAGC | 3010 | TCTGCGGCTGGCTCACTG | 3011 |
| UTRN | CTGCCAGAGTTGTTTCTTTTCG | 3012 | CAGGATCTGAGCTGGGCTCT | 3013 |
| UTRN | TGATGTCTGCCAGAGTTGTTTC | 3014 | TGACTTCAGGATCTGAGCTGG | 3015 |

[0059] Generally, one forward and one reverse primer are designed for each predicted exon-exon junction, as shown in FIG. 1B. To eliminate artefacts, the design algorithm generates at least two independent primer pairs for each AceView predicted event. In this way each alternative splicing event is validated by two independent PCR reactions. For the gene set analyzed in this study, an average of 37 primers was designed per gene. The primer sets are designed to amplify fragments ranging between 100-400 base pairs. It was found that this size range provides optimal accuracy during capillary electrophoresis separation of the amplicons and hence facilitates the automatic identification and assignment of amplicons (FIGS. 10 and 10).

### Example 2

### Data Collection and Analysis

[0060] Normal and serous epithelial ovarian cancer tissue samples were obtained as frozen specimens from the Cancer Research Network of the FRSQ. Histopathology, grade and stage were assigned according to the International Federation of Gynecology and Osbtetrics (FIGO) criteria. Only chemotherapy naïve tumor samples were used in the study. RNA Extraction from 50 mg tissue samples was done using TRIZOL® Reagent according to the manufacturer's protocol, using a PowerMax™ homogenizing system equipped with a 10 mm saw tooth blade (VWR International). To retain maximum yield of RNA, DNase treatment was not performed. Extracted RNA was isopropanol precipitated, then resuspended in pure water and stored at −80° C. RNA concentration was quantified on an Agilent 2100 BioAnalyzer (Agilent technologies). Typical total RNA yields of 1 to 66 μg per 50 mg specimen were obtained.

[0061] Ovarian tissues were classified as normal or cancerous according to the relative expression profile of the genes KRT18, KRT7, VIM, CDH1, TERT relative to GAPDH as measured by QPCR using PCR primers flanking dual fluorescent probes (see Table 3). Eight normal and eight tumour RNA samples showing expression data closest to the median for each gene's expression level for the normal or tumour tissue type were selected and combined in equal amounts to formulate 2 normal and 2 tumour pools of 4 samples each. Tissue quality control was established using real-time PCR amplification of known genes with known cancer or tissues type specific expression profile including the epithelial cell markers KRT7, KRT18 and CDH1, the stromal marker vimentin, and the tumour cell content indicator hTERT (Table 3). KRT7, KRT18 and CDH1 were shown to the upregulated in high grade serous ovarian cancer (Chu & Weiss, 2002, Mod Pathol, 15: 6-10; Ouellet et al., 2005, Oncogene, 24: 4672-4687; Sun et al., 2007, Eur J Obstet Gynecol Reprod Biol, 130: 249-257).

TABLE 3
Primer and dual labelled fluorescent probes used for quantitative PCR.

| GENE | Forward | Probe¹ | Reverse |
|---|---|---|---|
| CDH-1 | AATTCACCCAGGAGGTCTTTA | CTCCATCACAGAGGTTCCTGGAA | TTGGCTGAGGATGGTGTAA |
| | (SEQ ID N0: 3016) | GA (SEQ ID NO: 3017) | (SEQ ID NO: 3018) |
| KRT18 | TTCGCAAATACTGTGGACAA | CCAGCTCTGTCTCATACTTGACT | CCCATGGATGTCGTTCTC |
| | (SEQ ID NO: 3019) | CTAAAGTCA | (SEQ ID NO: 3021) |
| | | (SEQ ID NO: 3020) | |
| KRT7 | GCTGCTGAGAATGAGTTT | TAGGCAGCATCCACATCCTTCTT | GGTCCTGAGGAAGTTGATCTC |
| | GTG(SEQ ID NO: 3022) | CA (SEQ ID NO: 3023) | (SEQ ID NO: 3024) |
| TERT | TGTGCACCAACATCTACAAGA | CGTGAAACCTGTACGCCTGCAG | AGGCCGTGTCAGAGATGA |
| | (SEQ ID NO: 3025) | (SEQ ID N0: 3026) | (SEQ ID NO: 3027) |
| VIM | TCTTGACCTTGAACGCAAA | CCTGGATTTCCTCTTCGTGGAGT | CATGCTGTTCCTGAATCTGA |
| | (SEQ ID NO: 3028) | TT (SEQ ID NO: 3029) | (SEQ ID NO: 3030) |

¹Dual labelled fluorescent probe, with 5′-FAM, 3′-TAMRA.

[0062] Tissues that fail the quality control were considered to have low tumour tissue content or reflect different or aberrant tumour subset, and were not considered further in the study. For the quality control, tissues (normal and cancerous) are first classified based on histopathological assessment. Moreover, since the portion of tissue used for subsequent analysis may be from a different region of the tumor that been examined by pathologists, one must assess the quality of the tissue that will be used following classification by pathologists by comparing expression levels of the 5 genes with the median expression levels for all tissues of a given type (normal or tumour) as called by histopathological assessment. Normal versus tumour tissues have different expression patterns for these 5 genes.

[0063] Reverse transcription was performed on 2 μg total RNA samples in the presence of RNAse inhibitor according to the manufacturers' protocols. Reactions were primed with both (dT)21 and random hexamers at final concentrations of 1 μM and 0.9 μM respectively. The integrity of the cDNA was assessed by SYBR® Green based quantitative PCR, performed on three housekeeping genes: MRPL19, PUM1 and GAPDH using primers illustrated in Table 4.

TABLE 4
Primer used for SYBR Green based quantitative.

| | | SEQ | | SEQ |
|---|---|---|---|---|
| | | ID | | ID |
| GENE | Forward | NO: | Reverse | NO: |
| BMP4 | TCCACAGCACTGGTCTTGAG | 3031 | GATCACCTCGTTCTCAGGGA | 3032 |
| CHEK2 | GCGCCTGAAGTTCTTGTTTC | 3033 | GCCTTTGGATCCACTACCAA | 3034 |
| DNMT3B | CCATGCAACGATCTCTCAAA | 3035 | CAGCAGAAACTTTGATGGCA | 3036 |
| FN1 | ACCTGGAGGAGACCACATGA | 3037 | TACCATCATCCAGCCTTGGT | 3038 |
| HMGA1 | GCGAAGTGCCAACACCTAAG | 3039 | GAGATGCCCTCCTCTTCCTC | 3040 |
| HSC20 | ATACAGCGAAGCTCCAGCAC | 3041 | AGGGTCGAATGCTTCTCTGA | 3042 |
| UTRN | CTCATCCAGCAGTATTGCCA | 3043 | CTGGTCCTTCAGCTGCTCAT | 3044 |
| SYNE2 | TCACCCAGTCCTTACAACTCC | 3045 | CATCAACGTCACCCTTCCTC | 3046 |
| SHMT1 | CAATGACGATGCCAGTCAAC | 3047 | AACCCTCTGCCGGTTACTCT | 3048 |
| PTK2 | TCCGGAGGGTCTGATGAA | 3049 | GTGAACCAGGGTAGCCAGAA | 3050 |
| KITLG | CATTGCCAGCATTGTTTTCT | 3051 | TGTATATTTTCAACTGCCCTTGT | 3052 |
| GAPDH | GTGAAGGTCGGA | 3053 | TGCCATGGGTGG | 3054 |
| | GTCAACGGATTT | | AATCATATTGGA | |
| PUM1* | TGAGGTGTGCACCATGAAC | 3055 | CAGAATGTGCTTGCCATAGG | 3056 |
| MRPL19* | GGGATTTGCAT | 3057 | GGAAGGGCA | 3058 |
| | TCAGAGATCAG | | TCTCGTAAG | |

*sequences reported in Szabo et al. (2004, Genome Biol, 5: R59)

[0064] Ct (quantitative PCR cycle threshold) values for these genes, typically in the range of 14-25, depending on the gene, were used to verify the integrity of each cDNA sample. These Ct values are determined using standard SYBR green QPCR methods on an Eppendorf Mastercycler thermocycler. Following QPCR, the samples were analyzed by capillary electrophoresis to ensure that only one amplicon of the expected size was obtained.

[0065] PCR reactions were performed on 20 ng cDNA in 10 μl final volume containing 0.2 mM each dNTP, 1.5 mM MgCl2, 0.6 μM each primer and 0.2 units of Taq DNA polymerase. An initial incubation of 2 minutes at 95° C. was followed by 35 cycles at 94° C. 30 s, 55° C. 30 s, and 72° C. 60 s. The amplification was completed by a 2 minute incubation at 72° C.

[0066] RNA quantification and integrity analysis was performed on an Agilent bioanalyzer (Agilent, Santa Clara, Calif.), using the manufacturer's software. Analysis of the DNA amplification reactions was performed on Caliper LabChip® 90 instruments (Caliper LifeSciences, Hopkinton, Mass.), and amplicon sizing and relative quantification was performed by the manufacturer's software, prior to being uploaded to the LISA database.

[0067] The LISA was built around the LAMP solution stack of software programs (Linux operating system, Apache web server, Mysql database management server and Perl and Python programming languages). In addition, several peripheral Perl and Python modules for experimental design, analysis, and display of results interact with the LISA. Statistical t-tests and unsupervised clustering were performed using the R package.

[0068] The capillary electrophoresis instrument software (Caliper LifeSciences, Hopkinton, Mass.) provides size and concentration data for the detected peaks of each PCR reaction. These data are uploaded to the LISA database and compared with expected amplicon sizes for that experiment. Using the experimentally determined amplicon sizing data, a signal detection protocol assigns detected amplicons to expected sizes. Gene sequence, primer sequence, single nucleotide polymorphism sites and protein coding data are associated to each element of experimental data stored in the database.

[0069] For each PCR reaction covering an AS event, the concentration data from all RNA sources under consideration were used to determine the most prevalent assigned amplicon. For each RNA source, the ratio of the concentration of this amplicon to the total assigned amplicon concentrations measured is calculated and is expressed as a percentage, termed the percent splicing index, (PSI or Ψ). Ψ values for each reaction are used to compare alternative splicing profiles between RNA sources. Percent splicing index, Ψ values for different RNA sources are used in statistical t-tests, and resulting p-values are used in the screening process to determine cancer specificity. Reaction sets with Bonferroni-corrected p-values of less than 0.0002 were considered statistically significant hits.

[0070] The designed sets of PCR experiments are passed to the automated platform together with associated experimental conditions such as the RNA source, and PCR reaction conditions. Once the PCR amplification and capillary electrophoresis are completed, an electropherogram is generated that reflects the amplification pattern, as shown in FIG. 1D. The electropherogram is analyzed by the LISA and the detected amplicons are compared with the expected amplicon sizes and assigned correspondingly. If the detected peaks do not match some or all of the predicted amplicons, these peaks are labelled as “unassigned” and are stored in the database for subsequent novel splicing event analysis. In the present study, 4% of the primers failed to amplify a product. Failure of specific primers was easily offset by built-in redundancy in the PCR reaction design. On completion of the RT-PCR based gene annotation, the results obtained from different RNA sources are compared to identify sample-specific patterns of splicing. As shown in FIG. 1D, the alternative splicing event tested in Stim1, displayed a variable splicing pattern in these RNA sources. These results demonstrate that LISA can detect sample-specific differences in splicing patterns.

### Example 3

### Annotation and Display of Validated Splicing Events

[0071] In addition to the tissue specific representation shown in FIG. 1E, two additional representations of the annotation of splicing events have been developed within the LISA. As shown for the ovarian cancer associated gene SHMT1 (FIG. 2A), each intron is uniquely labelled, while transcript names are retained from AceView. By comparing different AceView transcripts, the LISA generates all potential alternative splicing events and each event is assigned a unique number. After the RT-PCR analysis of the gene as illustrated in FIGS. 1A to 1D, the expression of exon-exon junctions are displayed as “detected”, “not detected” or “not determined” with a confidence level ranging from low to high (FIG. 2B). In the case of SHMT1, 2 predicted exon junctions out of 28 were “not detected” in pools of RNA obtained from normal and ovarian serous tissues of 16 individuals with a very high degree of confidence (all primer sets in agreement). On the other hand, 3 exon-exon junctions were found to be tissue type-dependent with medium confidence rating (FIG. 2B, columns A, K and AB). Three exon-exon junctions were not determined in one RNA source (OVN Pool 3 in I, L and M) and one junction was not detected with high level confidence in any RNA source tested (FIG. 2B, column X). To monitor the relative expression of each splicing isoform, a schematic representation of each predicted splicing isoform is also generated by LISA. In this display (FIG. 2C), the long form generated by each alternative splicing event of SHMT1 is shown in green and the short form in red. Four splicing events were RNA source-specific and one short and one long form were not detected in one RNA source. Sequencing of selected source-specific amplicons identified by LISA confirmed the detection accuracy. This demonstrates the capacity of LISA to produce exon-exon or splice events specific annotation and that SHMT1 is spliced in a tissue-specific manner.

### Example 4

### Comparative Profiling of Splicing Events in Normal and Serous Ovarian Tumour Tissues

[0072] To identify cancer associated splicing events, a LISA based screening pipeline was constructed for genes associated with ovarian cancer (FIG. 3). Candidate ovarian cancer-associated genes were identified by a keyword search in public databases, yielding a list of 600 genes. All genes were entered into LISA for the identification of alternative splicing events and experimental design. A total of 4709 alternative splicing events were identified and 19 800 PCR reactions were designed. The screen was divided in two stages: the first termed the discovery screen and the second, the validation screen.

[0073] The discovery screen was carried out using two pools of RNA extracted from high-grade (grades 2 and 3; grades are standard clinical classification of tumor that take into account the size and invasive status of the tumor) serous epithelial ovarian cancer specimens and two pools of RNA extracted from unmatched normal ovaries (same age group and no prior chemotherapy). Each pool contained an equivalent mix of four independent tissues. Normal ovarian tissues were selected from women undergoing oophorectomy for reasons other than ovarian cancer, and the normality of the ovaries was confirmed by standard pathology tissue examination. Ovaries with benign tumours or cysts were excluded. Most of the donors were postmenopausal women of the age group when most serous tumours develop. Screening of the two cancers and two normal pools identified 104 cancer associated splicing events in 98 different genes. Alternative splicing events identified in the discovery screen were re-examined on individual RNA samples extracted from 25 serous epithelial ovarian cancers (grades 2 and 3) and 21 normal ovary samples. Overlapping PCR reactions using RNA from each tissue were carried out as in the discovery screen confirming the association of 48 alternative splicing events in 45 genes with ovarian cancer tissues. The other 56 events identified in the discovery phase were found to be associated only with a subclass of cancer tissues and thus may represent either differences between individuals or cancer subtypes. Table 5 gives the gene name and the percent of cancer tissue samples lying outside the range of the normal samples (defined as the percent of identification in Table 5). For example, 50% means half of the cancer tissue samples did not overlap with any of the normal tissue samples. The second column gives the p-values that characterize statistical separation between the cancer and normal populations.

TABLE 5
Gene name and the percent of cancer tissue samples lying outside the
range of the normal samples (percent of identification).

| Gene | Percent of Identification | MannWhitney_pvalue |
|---|---|---|
| BCMP11 | 60 | 5.09E−007 |
| C11orf17 | 75 | 1.55E−007 |
| CHEK2 | 0 | 3.93E−004 |
| DNMT3B | 90 | 3.25E−009 |
| BMP4 | 30 | 4.14E−005 |
| GNB3 | 55 | 2.19E−005 |
| GATA3 | 0 | 5.51E−005 |
| KITLG | 80 | 1.58E−005 |
| PAXIP1 | 85 | 2.84E−011 |
| PLD1 | 70 | 6.06E−008 |
| STIM1 | 100 | 5.51E−009 |
| NRG1 | 94.12 | 1.50E−006 |
| RAD52 | 40 | 7.72E−003 |
| SYNE2 | 95 | 1.23E−008 |
| TOPBP1 | 55 | 3.34E−008 |
| UTRN | 80 | 3.16E−007 |
| SLIT2 | 50 | 3.74E−005 |
| FN1EDB | 0 | 2.74E−006 |
| FN1EDA | 40 | 2.80E−004 |
| FN1IICSUP | 75 | 3.30E−007 |
| FN1IICSDOWN | 85 | 2.34E−008 |
| APC | 90 | 7.47E−008 |
| APP | 95 | 1.71E−009 |
| AXIN1 | 70 | 3.38E−006 |
| BTC | 40 | 4.96E−003 |
| CCNE1 | 40 | 5.25E−005 |
| FANCA | 35 | 1.11E−003 |
| FANCL | 10 | 3.98E−009 |
| FGFR1 | 40 | 1.62E−002 |
| FGFR2 | 40 | 1.05E−003 |
| FGFR4 | 0 | 1.05E−005 |
| IGSF4 | 75 | 2.24E−008 |
| LGALS9 | 30 | 5.20E−006 |
| MCL1 | 40 | 5.19E−006 |
| NUP98 | 45 | 1.60E−006 |
| POLI | 0 | 2.94E−004 |
| PTPN13 | 60 | 2.29E−007 |
| SYK | 65 | 7.63E−006 |
| TSSC4 | 45 | 3.96E−005 |
| TUBA1 | 0 | 1.72E−004 |
| C11ORF4 | 75 | 1.05E−007 |
| POLM | 30 | 2.60E−007 |
| PSAP | 75 | 2.08E−008 |
| HMGA1 | 0 | 1.80E−004 |
| PTK2 | 95 | 1.80E−008 |
| AFF3 | 55 | 2.11E−007 |
| SHMT1 | 20 | 4.50E−004 |
| HSC20 | 85 | 2.11E−007 |

[0074] This indicates that of the 600 genes associated with ovarian cancer, breast cancer and/or DNA damage/repair tested, 45 (7.5%) harboured at least one ovarian cancer-specific splicing event.

[0075] Following the discovery screen, candidate reactions covering AS events were selected for the validation screen using the Ψ values for the 4 pools. Reactions showing a difference of at least 10 percentage points between the mean Ψs for normal and tumour pools and a maximum standard deviation of the Ψs for each tissue type not exceeding 26% were selected. Following the validation screen, Ψ values were used in a t-test for significant differences between normal and tumour tissue samples. Reaction sets using Bonferroni corrected p-values<0.0002 were selected (see Table 5).

[0076] Graphical displays were generated with Perl-based analysis modules. The modules analyze the transcript map and capillary electrophoresis data obtained for each experiment data, and apply RNA source based unsupervised clustering of the results prior to generating the displays.

[0077] The entire discovery screen annotation dataset was queried to identify unassigned amplicons which were present in more than one pool sample, and which satisfy one of the following conditions: i) amplicon detected in normal pools only, ii) amplicon detected in tumour pools only, iii) amplicon detected in normal and tumour pools, but at least double the concentration one pool type relative to the other. Candidate amplicons identified by this in silico database query were purified by agarose gel electrophoresis and sequenced.

### Example 5

### Alternative Splicing of Cassette Exons is Enriched in Serous Ovarian Cancer

[0078] LISA-based analysis of alternative splicing automatically detects all types of alternative splicing with the exception of alternative intron inclusion, which requires special attention (FIGS. 4A and 4B). PCR amplicons generated from intron inclusion events are difficult to distinguish from those generated from genomic DNA contamination. Therefore, amplicons representing putative intron inclusion events were removed from the analysis pipeline for separate characterization. All other types of splicing events were divided into 7 groups based on the categories indicated at the bottom of FIG. 4B. Cassette exons were the most frequent alternative splicing event in the 182 gene subset considered, followed by alternative 3′, and then alternative 5′ splice events. The least frequent event was mutually exclusive alternative exons. Overall, about half of all EST-predicted alternative splicing events were validated. The general distribution of detected alternative events was slightly different than that of the predicted set. The main difference was an overrepresentation of alternative 3′ and alternative 5′ splice sites in the validated set (compare relative contribution of detected (black) and not detected (grey) events in FIG. 4A). The difference is likely due to the fact that the EST prediction is based on a large number of tissues while the data presented here are obtained only from ovarian tissues. Inspection of all validated cancer associated alternative events reveals the presence of one intron inclusion event and a large enrichment in alternative cassette exons (FIG. 4B). Indeed, 80% of the alternative splicing events associated with ovarian tumour involved alternative cassette exons. No alternative 3′ splice site events or mutually exclusive exons were part of the ovarian cancer signature. These data demonstrate that specific alterations in splicing control are occurring in serous ovarian cancers.

### Example 6

### Identification of a Novel Ovarian Cancer-Specific Alternative Splicing Event

[0079] When unpredicted amplification products were obtained, they were automatically classified as “unassigned” and stored for subsequent analysis. Sequencing of eight such products appearing in RNA samples from at least two different ovarian tissues revealed that only one represented a truly novel splicing event. Others were derived from the amplification of unrelated sequence or the amplification of unspliced DNA fragments. As shown in FIG. 5, the novel cancer-specific splice junction was found in ERBB2, wherein the sequence consist of:

(SEQ ID NO: 3061)
ggttcaccca ccagagtgat ntgtggagtt atggtgtgac tgtgtgggag ctgatgactt
ttggggccaa accttacgat gggatcccag cccgggagat ccctgacctg ctggaaaagg
gggagnnnnt gccccagccc cccatatgca ccattgatgt ctacatgatc atggtcaaat
gtgcgtggct gagctgtgct ggctgcctgg aggagggtgg gaggtcct.

[0080] A new splice site was found in the middle of a previously unspliced exon leading to the generation of two alternative splicing isoforms.

### Example 7

### Use of Alternative Splicing to Diagnose Ovarian Cancer

[0081] To evaluate the potential of the alternative splicing events identified by LISA as diagnostic markers for ovarian cancer, their individual and collective capacity to accurately differentiate between normal and cancer tissues was evaluated. The variance in the splicing pattern of each of the identified 48 ovarian cancer associated splicing events (Table 1) was calculated as percent splicing index (PSI, ψ) and was used to classify the 46 individual and 4 pools of normal and tumour tissues based on splicing similarity (FIG. 6). Strikingly, all tumour tissues clustered together. Visual examination of the splicing patterns present at opposing ends of the tissue cluster revealed that tissues could be classified as accurately by splicing events producing either the short or the long isoform (FIGS. 1 & 6). For example, in the case of DNMT3B, the short form is predominant in normal tissues while the long form (potential gain of a protein domain) is more abundant in cancer tissues. In contrast, SYNE2 displays a gain in protein sequence specifically in the normal tissue. The expression levels of the 45 genes listed in Table 1 were determined by quantitative PCR. As shown in FIG. 7, expression levels varied up to 5-fold between the 2 normal pools, and up to 3-fold between the 2 tumour pools. The overall expression level was consistently higher in both normal pools than in the cancer pool for 5 genes and was similar for 4 genes, while lower for 1 gene. The maximum expression level difference between normal and tumour was observed for KITLG, which showed a 9-fold higher expression in normal pool 1 compared to tumour pool 1. A correlation between shifts in alternative splicing and expression levels was not detected, and thus, for this data, expression and cancer specific-alternative splicing are distinctly regulated, as suggested previously by comparing tissue-specific expression and splicing profiles (Pan et al., 2004, Mol Cell, 16: 929-941). Consequently, the alternative splicing patterns is an efficient classifier that distinguishes serous epithelial ovarian cancer from normal ovarian tissues.

### Example 8

### Identification of Alternative Splicing Event Specific to Breast Cancer

[0082] Similarly to the methodology that is described hereinabove, the LISA based screening was used to identify a signature of diagnostic markers for breast cancer. The approach used differed in that only putative alternative splicing events, as opposed to all exon-exon junctions, were targeted by PCR primer pairs. This reduced the average number of PCR reactions per gene from 54 used for the ovarian tissue screen to 5 for the breast tissue screen of 600 genes.

TABLE 6
Properties of breast cancer-specific alternative splicing (AS) variants.

| | GENE | STRAND | ASE size, type (+ long in |
|---|---|---|---|
| GENE NAME | SYMBOL | DIRECTION | cancer, − short in cancer) |
| ADAM metallopeptidase domain 15 | ADAM15 | 1 | +75 nt exon, +72 nt exon |
| (metargidin) | | | |
| breast carcinoma amplified sequence 1 | BCAS1 | −1 | +66 nt exon |
| G protein-coupled receptor 137 | C11ORF4 | 1 | −150 nt exon |
| chemokine (C-C motif) ligand 4 | CCL4 | 1 | +113 nt exon |
| catenin (cadherin-associated protein), | CTNNA1 | 1 | −71 nt exon |
| alpha 1, 102 kDa | | | |
| discoidin domain receptor family, | DDR1 | 1 | +111 nt exon |
| member 1 | | | |
| DBF4 homolog B (S. cerevisiae). | DRF1 | 1 | +65 nt alt 3′ |
| desmocollin 3 | DSC3 | −1 | −43 nt exon |
| epithelial cell transforming sequence 2 | ECT2 | 1 | −93 nt exon |
| oncogene | | | |
| endothelial cell growth factor 1 (platelet- | ECGF1 | −1 | +274 nt intron |
| derived) | | | |
| coagulation factor III (thromboplastin, | F3 | −1 | +160 nt exon |
| tissue factor) | | | |
| fibronectin 1 | FN1 | −1 | +267 nt exon |
| cancer susceptibility candidate 4 | H63 | 1 | −168 nt exon |
| high mobility group AT-hook 1 | HMGA1 | 1 | +51 nt exon |
| hyaluronan-mediated motility receptor | HMMR | 1 | −48 nt exon |
| (RHAMM) | | | |
| insulin receptor | INSR | −1 | −36 nt exon |
| ligase III, DNA, ATP-dependent | LIG3 | 1 | −230 nt alt 3′ |
| ligase IV, DNA, ATP-dependent. | LIG4 | −1 | +73 nt exon |
| encoding Notch homolog 3 (Drosophila) | NOTCH3 | −1 | −156 nt exon |
| proprotein convertase subtilisin/kexin | PACE4 | −1 | +144 nt exon |
| type 6 | | | |
| polymerase (DNA directed), beta | POLB | 1 | −58 nt exon |
| protein tyrosine phosphatase, receptor | PTPRB | −1 | +264 nt exon |
| type, B | | | |
| CAP-GLY domain containing linker | RSN | −1 | +228 nt alt 3′, +117 nt exon |
| protein 1 | | | |
| CAP-GLY domain containing linker | RSN | −1 | −33 nt exon |
| protein 1 | | | |
| runt-related transcription factor 2 | RUNX2 | 1 | −66 nt exon |
| SHC (Src homology 2 domain containing) | SHC1 | −1 | +54 nt exon |
| transforming protein 1 | | | |
| tousled-like kinase 1 | TLK1 | −1 | −69 nt exon |
| CD40 molecule, TNF receptor | TNFRSF5 | 1 | −96 nt alt 3′ |
| superfamily member 5 | | | |

[0083] Consequently, the LISA methodology was efficient to identify specific signatures for two unrelated types of cancer (ovarian cancer and breast cancer).

[0084] While the invention has been described in connection with specific embodiments thereof, it will be understood that it is capable of further modifications and this application is intended to cover any variations, uses, or adaptations of the invention following, in general, the principles of the invention and including such departures from the present disclosure as come within known or customary practice within the art to which the invention pertains and as may be applied to the essential features hereinbefore set forth, and as follows in the scope of the appended claims.

The application's sequence listing, which the Patent Office published only in electronic form, follows.

SEQUENCE LISTING (3066 sequences)

SEQ ID NO: 1 - DNA, 22 bp, Artificial Sequence
  Synthetic construct
tacagatagacgagggctggtt

SEQ ID NO: 2 - DNA, 21 bp, Artificial Sequence
  Synthetic construct
catggacagcttcgacttagc

SEQ ID NO: 3 - DNA, 21 bp, Artificial Sequence
  Synthetic construct
gtgccatcatcctgttgagtt

SEQ ID NO: 4 - DNA, 21 bp, Artificial Sequence
  Synthetic construct
acttagccctgctccaggaat

SEQ ID NO: 5 - DNA, 22 bp, Artificial Sequence
  Synthetic construct
agaattaaacgtgccatcatcc

SEQ ID NO: 6 - DNA, 20 bp, Artificial Sequence
  Synthetic construct
caggaatgggacctcgagtc

SEQ ID NO: 7 - DNA, 27 bp, Artificial Sequence
  Synthetic construct
ggctcactgaagagagagtaactagaa

SEQ ID NO: 8 - DNA, 20 bp, Artificial Sequence
  Synthetic construct
agcttcgacttagccctgct

SEQ ID NO: 9 - DNA, 24 bp, Artificial Sequence
  Synthetic construct
ccatcatcctgttgagtttcttga

SEQ ID NO: 10 - DNA, 20 bp, Artificial Sequence
  Synthetic construct
atgggacctcgagtcactgt

SEQ ID NO: 11 - DNA, 20 bp, Artificial Sequence
  Synthetic construct
tcccaccatggacagcttcg

SEQ ID NO: 12 - DNA, 20 bp, Artificial Sequence
  Synthetic construct
ctgctccaggaatgggacct

SEQ ID NO: 13 - DNA, 18 bp, Artificial Sequence
  Synthetic construct
gcggcgacgctgacacct

SEQ ID NO: 14 - DNA, 20 bp, Artificial Sequence
  Synthetic construct
ctgatcacctgcctttccag

SEQ ID NO: 15 - DNA, 21 bp, Artificial Sequence
  Synthetic construct
gtttgaagtcgacacccagag

SEQ ID NO: 16 - DNA, 23 bp, Artificial Sequence
  Synthetic construct
cctccgtaatgcatttctatctg

SEQ ID NO: 17 - DNA, 18 bp, Artificial Sequence
  Synthetic construct
ccagtttgtcccccttcc

SEQ ID NO: 18 - DNA, 24 bp, Artificial Sequence
  Synthetic construct
ttctttcctccgtaatgcatttct

SEQ ID NO: 19 - DNA, 19 bp, Artificial Sequence
  Synthetic construct
gcctttccagaccggagac

SEQ ID NO: 20 - DNA, 22 bp, Artificial Sequence
  Synthetic construct
gagagttcatcccccttgttag

SEQ ID NO: 21 - DNA, 20 bp, Artificial Sequence
  Synthetic construct
agaggccagtttgtccccct

SEQ ID NO: 22 - DNA, 20 bp, Artificial Sequence
  Synthetic construct
tccggttggagagttcatcc

SEQ ID NO: 23 - DNA, 20 bp, Artificial Sequence
  Synthetic construct
agtcgacacccagaggccag

SEQ ID NO: 24 - DNA, 26 bp, Artificial Sequence
  Synthetic construct
catcataattgcctaaagtgttctgg

SEQ ID NO: 25 - DNA, 20 bp, Artificial Sequence
  Synthetic construct
agacgggcggcaagtttgaa

SEQ ID NO: 26 - DNA, 22 bp, Artificial Sequence
  Synthetic construct
gcctaaagtgttctggatccgg

SEQ ID NO: 27 - DNA, 23 bp, Artificial Sequence
  Synthetic construct
cggcaagtttgaagtcgacaccc

SEQ ID NO: 28 - DNA, 24 bp, Artificial Sequence
  Synthetic construct
aaagtgttctggatccggttggag

SEQ ID NO: 29 - DNA, 20 bp, Artificial Sequence
  Synthetic construct
cacctgcctttccagaccgg

SEQ ID NO: 30 - DNA, 23 bp, Artificial Sequence
  Synthetic construct
tctggatccggttggagagttca

SEQ ID NO: 31 - DNA, 26 bp, Artificial Sequence
  Synthetic construct
tcctacagctacagagattcaagatg

SEQ ID NO: 32 - DNA, 21 bp, Artificial Sequence
  Synthetic construct
tctctcagtcgagcaagttcc

SEQ ID NO: 33 - DNA, 22 bp, Artificial Sequence
  Synthetic construct
tgttcagcagttggacttaacg

SEQ ID NO: 34 - DNA, 20 bp, Artificial Sequence
  Synthetic construct
ttgtggcttggtttctctgg

SEQ ID NO: 35 - DNA, 23 bp, Artificial Sequence
  Synthetic construct
caagatgtatgttcagcagttgg

SEQ ID NO: 36 - DNA, 21 bp, Artificial Sequence
  Synthetic construct
cgacgtttctttcgtttctcc

SEQ ID NO: 37 - DNA, 25 bp, Artificial Sequence
  Synthetic construct
gcagttggacttaacgtatttcttg

SEQ ID NO: 38 - DNA, 20 bp, Artificial Sequence
  Synthetic construct
aagttcctgccgacgtttct

SEQ ID NO: 39 - DNA, 25 bp, Artificial Sequence
  Synthetic construct
gctgttgaaaatcctacagctacag

SEQ ID NO: 40 - DNA, 22 bp, Artificial Sequence
  Synthetic construct
cttcttgggaaacgtcatcttc

SEQ ID NO: 41 - DNA, 20 bp, Artificial Sequence
  Synthetic construct
aagaccatcgcagagggaag

SEQ ID NO: 42 - DNA, 21 bp, Artificial Sequence
  Synthetic construct
gtcatcttctcaagtgcagcc

SEQ ID NO: 43 - DNA, 21 bp, Artificial Sequence
  Synthetic construct
aggcgaatccccataagtaag

SEQ ID NO: 44 - DNA, 20 bp, Artificial Sequence
  Synthetic construct
tctcaagtgcagccatcttg

SEQ ID NO: 45 - DNA, 22 bp, Artificial Sequence
  Synthetic construct
aataagaagaccatcgcagagg

SEQ ID NO: 46 - DNA, 21 bp, Artificial Sequence
  Synthetic construct
ttcgtttctccttcttcaggg

SEQ ID NO: 47 - DNA, 18 bp, Artificial Sequence
  Synthetic construct
cagagggaaggcgaatcc

SEQ ID NO: 48 - DNA, 22 bp, Artificial Sequence
  Synthetic construct
ctggaaatgtcatcttcttggg

SEQ ID NO: 49 - DNA, 26 bp, Artificial Sequence
  Synthetic construct
tttaaataataagaagaccatcgcag

SEQ ID NO: 50 - DNA, 22 bp, Artificial Sequence
  Synthetic construct
cctgacccctcagacattctta

SEQ ID NO: 51 - DNA, 20 bp, Artificial Sequence
  Synthetic construct
agggaaggcgaatccccata

SEQ ID NO: 52 - DNA, 24 bp, Artificial Sequence
  Synthetic construct
tgagagtcctgagtctctcagtcg

SEQ ID NO: 53 - DNA, 20 bp, Artificial Sequence
  Synthetic construct
catcgcagagggaaggcgaa

SEQ ID NO: 54 - DNA, 22 bp, Artificial Sequence
  Synthetic construct
tcctgccgacgtttctttcgtt

SEQ ID NO: 55 - DNA, 27 bp, Artificial Sequence
  Synthetic construct
agagggaaggcgaatccccataagtaa

SEQ ID NO: 56 - DNA, 20 bp, Artificial Sequence
  Synthetic construct
tcgagcaagttcctgccgac

SEQ ID NO: 57 - DNA, 20 bp, Artificial Sequence
  Synthetic construct
gcaaccggaacaactttgac

SEQ ID NO: 58 - DNA, 20 bp, Artificial Sequence
  Synthetic construct
gggcatgttcattctcatcc

SEQ ID NO: 59 - DNA, 22 bp, Artificial Sequence
  Synthetic construct
atgtgactgaagggaagtgtgc

SEQ ID NO: 60 - DNA, 20 bp, Artificial Sequence
  Synthetic construct
cgagatacttgtcaacggca

SEQ ID NO: 61 - DNA, 23 bp, Artificial Sequence
  Synthetic construct
tgacacagaagagtactgcatgg

SEQ ID NO: 62 - DNA, 20 bp, Artificial Sequence
  Synthetic construct
ttctggaaatgggcatgttc

SEQ ID NO: 63 - DNA, 20 bp, Artificial Sequence
  Synthetic construct
gtgtgccccattcttttacg

SEQ ID NO: 64 - DNA, 20 bp, Artificial Sequence
  Synthetic construct
gcctctctttggctttctgg

SEQ ID NO: 65 - DNA, 23 bp, Artificial Sequence
  Synthetic construct
actttgatgtgactgaagggaag

SEQ ID NO: 66 - DNA, 20 bp, Artificial Sequence
  Synthetic construct
attctctctcggtgcttggc

SEQ ID NO: 67 - DNA, 22 bp, Artificial Sequence
  Synthetic construct
cggaacaactttgacacagaag

SEQ ID NO: 68 - DNA, 20 bp, Artificial Sequence
  Synthetic construct
ttggcctcaagcctctcttt

SEQ ID NO: 69 - DNA, 20 bp, Artificial Sequence
  Synthetic construct
ttcttttacggcggatgtgg

SEQ ID NO: 70 - DNA, 20 bp, Artificial Sequence
  Synthetic construct
tttggctttctggaaatggg

SEQ ID NO: 71 - DNA, 20 bp, Artificial Sequence
  Synthetic construct
aagggaagtgtgccccattc

SEQ ID NO: 72 - DNA, 22 bp, Artificial Sequence
  Synthetic construct
atacttgtcaacggcatcaggg

SEQ ID NO: 73 - DNA, 26 bp, Artificial Sequence
  Synthetic construct
acaactttgacacagaagagtactgc

SEQ ID NO: 74 - DNA, 22 bp, Artificial Sequence
  Synthetic construct
ggaaatgggcatgttcattctc

SEQ ID NO: 75 - DNA, 20 bp, Artificial Sequence
  Synthetic construct
agtactgcatggccgtgtgt

SEQ ID NO: 76 - DNA, 22 bp, Artificial Sequence
  Synthetic construct
cctcaagcctctctttggcttt

SEQ ID NO: 77 - DNA, 20 bp, Artificial Sequence
  Synthetic construct
ccccattcttttacggcgga

SEQ ID NO: 78 - DNA, 20 bp, Artificial Sequence
  Synthetic construct
tctcggtgcttggcctcaag

SEQ ID NO: 79 - DNA, 19 bp, Artificial Sequence
  Synthetic construct
atgtggcggcaaccggaac

SEQ ID NO: 80 - DNA, 24 bp, Artificial Sequence
  Synthetic construct
gcatgttcattctcatccccaggt

SEQ ID NO: 81 - DNA, 27 bp, Artificial Sequence
  Synthetic construct
gaagggaagtgtgccccattcttttac

SEQ ID NO: 82 - DNA, 27 bp, Artificial Sequence
  Synthetic construct
tctcgagatacttgtcaacggcatcag

SEQ ID NO: 83 - DNA, 18 bp, Artificial Sequence
  Synthetic construct
atggccgtgtgtggcagc

SEQ ID NO: 84 - DNA, 21 bp, Artificial Sequence
  Synthetic construct
ctgggacattctctctcggtg

SEQ ID NO: 85 - DNA, 20 bp, Artificial Sequence
  Synthetic construct
aggtgtgctctgaacaagcc

SEQ ID NO: 86 - DNA, 21 bp, Artificial Sequence
  Synthetic construct
ggtactggctgctgttgtagg

SEQ ID NO: 87 - DNA, 22 bp, Artificial Sequence
  Synthetic construct
cgctggtactttgatgtgactg

SEQ ID NO: 88 - DNA, 20 bp, Artificial Sequence
  Synthetic construct
atccccaggtgtctcgagat

SEQ ID NO: 89 - DNA, 18 bp, Artificial Sequence
  Synthetic construct
tgccgagcaatgatctcc

SEQ ID NO: 90 - DNA, 19 bp, Artificial Sequence
  Synthetic construct
gcatcaggggtactggctg

SEQ ID NO: 91 - DNA, 19 bp, Artificial Sequence
  Synthetic construct
ctctgaacaagccgagacg

SEQ ID NO: 92 - DNA, 20 bp, Artificial Sequence
  Synthetic construct
ttctcatccccaggtgtctc

SEQ ID NO: 93 - DNA, 21 bp, Artificial Sequence
  Synthetic construct
aatgatctcccgctggtactt

SEQ ID NO: 94 - DNA, 20 bp, Artificial Sequence
  Synthetic construct
tcaacggcatcaggggtact

SEQ ID NO: 95 - DNA, 20 bp, Artificial Sequence
  Synthetic construct
cgagcaatgatctcccgctg

SEQ ID NO: 96 - DNA, 23 bp, Artificial Sequence
  Synthetic construct
atcaggggtactggctgctgttg

SEQ ID NO: 97 - DNA, 19 bp, Artificial Sequence
  Synthetic construct
ggccgtgccgagcaatgat

SEQ ID NO: 98 - DNA, 27 bp, Artificial Sequence
  Synthetic construct
attctcatccccaggtgtctcgagata

SEQ ID NO: 99 - DNA, 23 bp, Artificial Sequence
  Synthetic construct
atctcccgctggtactttgatgt

SEQ ID NO: 100 - DNA, 21 bp, Artificial Sequence
  Synthetic construct
tctgcctcttcccattctctc

SEQ ID NO: 101 - DNA, 18 bp, Artificial Sequence
  Synthetic construct
acaagccgagacggggcc

SEQ ID NO: 102 - DNA, 20 bp, Artificial Sequence
  Synthetic construct
tggctgcttcctgttccaaa

SEQ ID NO: 103 - DNA, 20 bp, Artificial Sequence
  Synthetic construct
tgtggaagaggtggttcgag

SEQ ID NO: 104 - DNA, 21 bp, Artificial Sequence
  Synthetic construct
gttctttgcttgacgttctgc

SEQ ID NO: 105 - DNA, 23 bp, Artificial Sequence
  Synthetic construct
agagtctgtggaagaggtggttc

SEQ ID NO: 106 - DNA, 20 bp, Artificial Sequence
  Synthetic construct
ggcaagttctttgcttgacg

SEQ ID NO: 107 - DNA, 21 bp, Artificial Sequence
  Synthetic construct
cagagagaaccaccagcattg

SEQ ID NO: 108 - DNA, 22 bp, Artificial Sequence
  Synthetic construct
cagctttaggcaagttctttgc

SEQ ID NO: 109 - DNA, 18 bp, Artificial Sequence
  Synthetic construct
caccagcattgccaccac

SEQ ID NO: 110 - DNA, 22 bp, Artificial Sequence
  Synthetic construct
tgccttcttatcagctttaggc

SEQ ID NO: 111 - DNA, 22 bp, Artificial Sequence
  Synthetic construct
aagaagccacagagagaaccac

SEQ ID NO: 112 - DNA, 26 bp, Artificial Sequence
  Synthetic construct
ttcttatcagctttaggcaagttctt

SEQ ID NO: 113 - DNA, 20 bp, Artificial Sequence
  Synthetic construct
aatccaagcggagagagtca

SEQ ID NO: 114 - DNA, 20 bp, Artificial Sequence
  Synthetic construct
aacattgggtggtgtccact

SEQ ID NO: 115 - DNA, 21 bp, Artificial Sequence
  Synthetic construct
tgactattgaaggcttgcagc

SEQ ID NO: 116 - DNA, 21 bp, Artificial Sequence
  Synthetic construct
acttcaggtcagttggtgcag

SEQ ID NO: 117 - DNA, 26 bp, Artificial Sequence
  Synthetic construct
gtggagtatgtggttagtgtctatgc

SEQ ID NO: 118 - DNA, 21 bp, Artificial Sequence
  Synthetic construct
cttgtgggtgtgacctgagtg

SEQ ID NO: 119 - DNA, 22 bp, Artificial Sequence
  Synthetic construct
agagtcagcctctggttcagac

SEQ ID NO: 120 - DNA, 20 bp, Artificial Sequence
  Synthetic construct
tccagtgagctgaacattgg

SEQ ID NO: 121 - DNA, 20 bp, Artificial Sequence
  Synthetic construct
ctcagaatccaagcggagag

SEQ ID NO: 122 - DNA, 20 bp, Artificial Sequence
  Synthetic construct
agctgaacattgggtggtgt

SEQ ID NO: 123 - DNA, 24 bp, Artificial Sequence
  Synthetic construct
cagaaatgactattgaaggcttgc

SEQ ID NO: 124 - DNA, 22 bp, Artificial Sequence
  Synthetic construct
aggtcagttggtgcaggaatag

SEQ ID NO: 125 - DNA, 22 bp, Artificial Sequence
  Synthetic construct
ctggttcagactgcagtaacca

SEQ ID NO: 126 - DNA, 20 bp, Artificial Sequence
  Synthetic construct
gtcacccgcactcgatatcc

SEQ ID NO: 127 - DNA, 21 bp, Artificial Sequence
  Synthetic construct
agcccacagtggagtatgtgg

SEQ ID NO: 128 - DNA, 22 bp, Artificial Sequence
  Synthetic construct
tgtgacctgagtgaacttcagg

SEQ ID NO: 129 - DNA, 27 bp, Artificial Sequence
  Synthetic construct
atgtggttagtgtctatgctcagaatc

SEQ ID NO: 130 - DNA, 20 bp, Artificial Sequence
  Synthetic construct
ctcaggcttgtgggtgtgac

SEQ ID NO: 131 - DNA, 20 bp, Artificial Sequence
  Synthetic construct
agcggagagagtcagcctct

SEQ ID NO: 132 - DNA, 22 bp, Artificial Sequence
  Synthetic construct
tcgatatccagtgagctgaaca

SEQ ID NO: 133 - DNA, 20 bp, Artificial Sequence
  Synthetic construct
gaaggcttgcagcccacagt

SEQ ID NO: 134 - DNA, 24 bp, Artificial Sequence
  Synthetic construct
ctgagtgaacttcaggtcagttgg

SEQ ID NO: 135 - DNA, 23 bp, Artificial Sequence
  Synthetic construct
tgtctatgctcagaatccaagcg

SEQ ID NO: 136 - DNA, 18 bp, Artificial Sequence
  Synthetic construct
gtgtccactgggcgctca

SEQ ID NO: 137 - DNA, 25 bp, Artificial Sequence
  Synthetic construct
tcagcctctggttcagactgcagta

SEQ ID NO: 138 - DNA, 27 bp, Artificial Sequence
  Synthetic construct
gatatccagtgagctgaacattgggtg

SEQ ID NO: 139 - DNA, 27 bp, Artificial Sequence
  Synthetic construct
gcccacagtggagtatgtggttagtgt

SEQ ID NO: 140 - DNA, 27 bp, Artificial Sequence
  Synthetic construct
ttgtgggtgtgacctgagtgaacttca

SEQ ID NO: 141 - DNA, 27 bp, Artificial Sequence
  Synthetic construct
ctatgctcagaatccaagcggagagag

SEQ ID NO: 142 - DNA, 19 bp, Artificial Sequence
  Synthetic construct
gggtggtgtccactgggcg

SEQ ID NO: 143 - DNA, 22 bp, Artificial Sequence
  Synthetic construct
gcttgcagcccacagtggagta

SEQ ID NO: 144 - DNA, 18 bp, Artificial Sequence
  Synthetic construct
gggcgctcaggcttgtgg

SEQ ID NO: 145 - DNA, 21 bp, Artificial Sequence
  Synthetic construct
ggatgacaaggaaagtgtccc

SEQ ID NO: 146 - DNA, 22 bp, Artificial Sequence
  Synthetic construct
gaggtgtgctctcatgttgttc

SEQ ID NO: 147 - DNA, 22 bp, Artificial Sequence
  Synthetic construct
gttggttaaatcaatggatggg

SEQ ID NO: 148 - DNA, 23 bp, Artificial Sequence
  Synthetic construct
gcctggagtacaatgtcagtgtt

SEQ ID NO: 149 - DNA, 20 bp, Artificial Sequence
  Synthetic construct
tggtgtctggaccaatgttg

SEQ ID NO: 150 - DNA, 23 bp, Artificial Sequence
  Synthetic construct
tgcacttttgataacctgagtcc

SEQ ID NO: 151 - DNA, 20 bp, Artificial Sequence
  Synthetic construct
aggtcagtgggaggaggaac

SEQ ID NO: 152 - DNA, 25 bp, Artificial Sequence
  Synthetic construct
ggaaagtgtccctatctctgatacc

SEQ ID NO: 153 - DNA, 23 bp, Artificial Sequence
  Synthetic construct
caggaagttggttaaatcaatgg

SEQ ID NO: 154 - DNA, 22 bp, Artificial Sequence
  Synthetic construct
cactgtcaaggatgacaaggaa

SEQ ID NO: 155 - DNA, 18 bp, Artificial Sequence
  Synthetic construct
gtggagcccaggtgacac

SEQ ID NO: 156 - DNA, 22 bp, Artificial Sequence
  Synthetic construct
atctctgataccatcatcccag

SEQ ID NO: 157 - DNA, 22 bp, Artificial Sequence
  Synthetic construct
gtgagtaacgcaccaggaagtt

SEQ ID NO: 158 - DNA, 25 bp, Artificial Sequence
  Synthetic construct
agtgtttacactgtcaaggatgaca

SEQ ID NO: 159 - DNA, 20 bp, Artificial Sequence
  Synthetic construct
aggtgacacgcatggtgtct

SEQ ID NO: 160 - DNA, 19 bp, Artificial Sequence
  Synthetic construct
ataacctgagtcccggcct

SEQ ID NO: 161 - DNA, 20 bp, Artificial Sequence
  Synthetic construct
caatgttggtgaatcgcagg

SEQ ID NO: 162 - DNA, 24 bp, Artificial Sequence
  Synthetic construct
tgacaaggaaagtgtccctatctc

SEQ ID NO: 163 - DNA, 20 bp, Artificial Sequence
  Synthetic construct
cgcaccaggaagttggttaa

SEQ ID NO: 164 - DNA, 20 bp, Artificial Sequence
  Synthetic construct
ttggaagaagtggtccatgc

SEQ ID NO: 165 - DNA, 19 bp, Artificial Sequence
  Synthetic construct
aatcgcaggtcagtgggag

SEQ ID NO: 166 - DNA, 26 bp, Artificial Sequence
  Synthetic construct
tgtccctatctctgataccatcatcc

SEQ ID NO: 167 - DNA, 20 bp, Artificial Sequence
  Synthetic construct
cacaggtgagtaacgcacca

SEQ ID NO: 168 - DNA, 21 bp, Artificial Sequence
  Synthetic construct
tgatcagagctcctgcacttt

SEQ ID NO: 169 - DNA, 20 bp, Artificial Sequence
  Synthetic construct
ttggtgaatcgcaggtcagt

SEQ ID NO: 170 - DNA, 27 bp, Artificial Sequence
  Synthetic construct
ctgtcaaggatgacaaggaaagtgtcc

SEQ ID NO: 171 - DNA, 21 bp, Artificial Sequence
  Synthetic construct
aatcaatggatgggggtggag

SEQ ID NO: 172 - DNA, 22 bp, Artificial Sequence
  Synthetic construct
agctcctgcacttttgataacc

SEQ ID NO: 173 - DNA, 20 bp, Artificial Sequence
  Synthetic construct
tggaccaatgttggtgaatc

SEQ ID NO: 174 - DNA, 20 bp, Artificial Sequence
  Synthetic construct
tccatgctgatcagagctcc

SEQ ID NO: 175 - DNA, 20 bp, Artificial Sequence
  Synthetic construct
acacgcatggtgtctggacc

SEQ ID NO: 176 - DNA, 23 bp, Artificial Sequence
  Synthetic construct
gaagaagtggtccatgctgatca

SEQ ID NO: 177 - DNA, 19 bp, Artificial Sequence
  Synthetic construct
agcccaggtgacacgcatg

SEQ ID NO: 178 - DNA, 20 bp, Artificial Sequence
  Synthetic construct
caaacggccagcagggaaat

SEQ ID NO: 179 - DNA, 27 bp, Artificial Sequence
  Synthetic construct
atggtgtctggaccaatgttggtgaat

SEQ ID NO: 180 - DNA, 27 bp, Artificial Sequence
  Synthetic construct
attctttggaagaagtggtccatgctg

SEQ ID NO: 181 - DNA, 20 bp, Artificial Sequence
  Synthetic construct
gatgggggtggagcccaggt

SEQ ID NO: 182 - DNA, 20 bp, Artificial Sequence
  Synthetic construct
ccataaggcataggccaaga

SEQ ID NO: 183 - DNA, 20 bp, Artificial Sequence
  Synthetic construct
tcagtgcctccactatgacg

SEQ ID NO: 184 - DNA, 22 bp, Artificial Sequence
  Synthetic construct
ctctcagacaaccatctcatgg

SEQ ID NO: 185 - DNA, 20 bp, Artificial Sequence
  Synthetic construct
tcatcctgttggcactgatg

SEQ ID NO: 186 - DNA, 20 bp, Artificial Sequence
  Synthetic construct
aacaacctcttcccgaacct

SEQ ID NO: 187 - DNA, 22 bp, Artificial Sequence
  Synthetic construct
ggcactgatgaagaacccttac

SEQ ID NO: 188 - DNA, 20 bp, Artificial Sequence
  Synthetic construct
gaaccttatgcctctgctgg

SEQ ID NO: 189 - DNA, 22 bp, Artificial Sequence
  Synthetic construct
tcatttcatgtcatcctgttgg

SEQ ID NO: 190 - DNA, 20 bp, Artificial Sequence
  Synthetic construct
tgctggtctttcagtgcctc

SEQ ID NO: 191 - DNA, 20 bp, Artificial Sequence
  Synthetic construct
cccattccaggacacttctg

SEQ ID NO: 192 - DNA, 22 bp, Artificial Sequence
  Synthetic construct
tccactatgacgttgtaggtgg

SEQ ID NO: 193 - DNA, 24 bp, Artificial Sequence
  Synthetic construct
caagaagctctctctcagacaacc

SEQ ID NO: 194 - DNA, 20 bp, Artificial Sequence
  Synthetic construct
ttgcccacggtaacaacctc

SEQ ID NO: 195 - DNA, 22 bp, Artificial Sequence
  Synthetic construct
cctgttggcactgatgaagaac

SEQ ID NO: 196 - DNA, 22 bp, Artificial Sequence
  Synthetic construct
cttatgcctctgctggtctttc

SEQ ID NO: 197 - DNA, 25 bp, Artificial Sequence
  Synthetic construct
ggacacttctgagtacatcatttca

SEQ ID NO: 198 - DNA, 20 bp, Artificial Sequence
  Synthetic construct
tcttcccgaaccttatgcct

SEQ ID NO: 199 - DNA, 25 bp, Artificial Sequence
  Synthetic construct
ctgagtacatcatttcatgtcatcc

SEQ ID NO: 200 - DNA, 22 bp, Artificial Sequence
  Synthetic construct
ggtctttcagtgcctccactat

SEQ ID NO: 201 - DNA, 24 bp, Artificial Sequence
  Synthetic construct
cattccaggacacttctgagtaca

SEQ ID NO: 202 - DNA, 20 bp, Artificial Sequence
  Synthetic construct
cacggtaacaacctcttccc

SEQ ID NO: 203 - DNA, 27 bp, Artificial Sequence
  Synthetic construct
aagctctctctcagacaaccatctcat

SEQ ID NO: 204 - DNA, 20 bp, Artificial Sequence
  Synthetic construct
cagagttgcccacggtaaca

SEQ ID NO: 205 - DNA, 24 bp, Artificial Sequence
  Synthetic construct
ttcatgtcatcctgttggcactga

SEQ ID NO: 206 - DNA, 27 bp, Artificial Sequence
  Synthetic construct
taacaacctcttcccgaaccttatgcc

SEQ ID NO: 207 - DNA, 18 bp, Artificial Sequence
  Synthetic construct
atctcatgggccccattc

SEQ ID NO: 208 - DNA, 24 bp, Artificial Sequence
  Synthetic construct
agtgcctccactatgacgttgtag

SEQ ID NO: 209 - DNA, 20 bp, Artificial Sequence
  Synthetic construct
acaaccatctcatgggcccc

SEQ ID NO: 210 - DNA, 18 bp, Artificial Sequence
  Synthetic construct
tggcacctctggtgaggc

SEQ ID NO: 211 - DNA, 19 bp, Artificial Sequence
  Synthetic construct
atgggccccattccaggac

SEQ ID NO: 212 - DNA, 22 bp, Artificial Sequence
  Synthetic construct
atgacgttgtaggtggcacctc

SEQ ID NO: 213 - DNA, 20 bp, Artificial Sequence
  Synthetic construct
ccataaggcataggccaaga

SEQ ID NO: 214 - DNA, 21 bp, Artificial Sequence
  Synthetic construct
tggcactggtagaagttccag

SEQ ID NO: 215 - DNA, 20 bp, Artificial Sequence
  Synthetic construct
gaggaacatggttttaggcg

SEQ ID NO: 216 - DNA, 22 bp, Artificial Sequence
  Synthetic construct
tgtcagagtggcactggtagaa

SEQ ID NO: 217 - DNA, 23 bp, Artificial Sequence
  Synthetic construct
caaatgatctttgaggaacatgg

SEQ ID NO: 218 - DNA, 20 bp, Artificial Sequence
  Synthetic construct
ctggtgaggcctgtcagagt

SEQ ID NO: 219 - DNA, 20 bp, Artificial Sequence
  Synthetic construct
ataggccaagaccatacccg

SEQ ID NO: 220 - DNA, 20 bp, Artificial Sequence
  Synthetic construct
gtaggtggcacctctggtga

SEQ ID NO: 221 - DNA, 20 bp, Artificial Sequence
  Synthetic construct
accatacccgccgaatgtag

SEQ ID NO: 222 - DNA, 19 bp, Artificial Sequence
  Synthetic construct
aggcctgtcagagtggcac

SEQ ID NO: 223 - DNA, 25 bp, Artificial Sequence
  Synthetic construct
gatctttgaggaacatggttttagg

SEQ ID NO: 224 - DNA, 20 bp, Artificial Sequence
  Synthetic construct
cacctctggtgaggcctgtc

SEQ ID NO: 225 - DNA, 18 bp, Artificial Sequence
  Synthetic construct
accacaccgcccacaacg

SEQ ID NO: 226 - DNA, 27 bp, Artificial Sequence
  Synthetic construct
agagttgcccacggtaacaacctcttc

SEQ ID NO: 227 - DNA, 23 bp, Artificial Sequence
  Synthetic construct
taaggcataggccaagaccatac

SEQ ID NO: 228 - DNA, 20 bp, Artificial Sequence
  Synthetic construct
taggttggttcaagccttcg

SEQ ID NO: 229 - DNA, 19 bp, Artificial Sequence
  Synthetic construct
cacccccataaggcatagg

SEQ ID NO: 230 - DNA, 21 bp, Artificial Sequence
  Synthetic construct
tcatccgtaggttggttcaag

SEQ ID NO: 231 - DNA, 18 bp, Artificial Sequence
  Synthetic construct
aacggccacccccataag

SEQ ID NO: 232 - DNA, 20 bp, Artificial Sequence
  Synthetic construct
aagcacgagtcatccgtagg

SEQ ID NO: 233 - DNA, 20 bp, Artificial Sequence
  Synthetic construct
ccaagaccatacccgccgaa

SEQ ID NO: 234 - DNA, 23 bp, Artificial Sequence
  Synthetic construct
cacgagtcatccgtaggttggtt

SEQ ID NO: 235 - DNA, 18 bp, Artificial Sequence
  Synthetic construct
tttaggcggaccacaccg

SEQ ID NO: 236 - DNA, 20 bp, Artificial Sequence
  Synthetic construct
gggtcaaagcacgagtcatc

SEQ ID NO: 237 - DNA, 20 bp, Artificial Sequence
  Synthetic construct
acatggttttaggcggacca

SEQ ID NO: 238 - DNA, 22 bp, Artificial Sequence
  Synthetic construct
aactgtgtaggggtcaaagcac

SEQ ID NO: 239 - DNA, 18 bp, Artificial Sequence
  Synthetic construct
accgcccacaacggccac

SEQ ID NO: 240 - DNA, 27 bp, Artificial Sequence
  Synthetic construct
gtcaaagcacgagtcatccgtaggttg

SEQ ID NO: 241 - DNA, 22 bp, Artificial Sequence
  Synthetic construct
gggcaacaaatgatctttgagg

SEQ ID NO: 242 - DNA, 24 bp, Artificial Sequence
  Synthetic construct
gtgtaggggtcaaagcacgagtca

SEQ ID NO: 243 - DNA, 20 bp, Artificial Sequence
  Synthetic construct
ggactcaatccaaatgcctc

SEQ ID NO: 244 - DNA, 20 bp, Artificial Sequence
  Synthetic construct
gttcccactcatctccaacg

SEQ ID NO: 245 - DNA, 22 bp, Artificial Sequence
  Synthetic construct
atgcctctacaggacaagaagc

SEQ ID NO: 246 - DNA, 21 bp, Artificial Sequence
  Synthetic construct
ttcagacattcgttcccactc

SEQ ID NO: 247 - DNA, 23 bp, Artificial Sequence
  Synthetic construct
agactatcacctgtacccacacg

SEQ ID NO: 248 - DNA, 20 bp, Artificial Sequence
  Synthetic construct
catctccaacggcataatgg

SEQ ID NO: 249 - DNA, 24 bp, Artificial Sequence
  Synthetic construct
acaggacaagaagctctctctcag

SEQ ID NO: 250 - DNA, 21 bp, Artificial Sequence
  Synthetic construct
ctggcacaacagtttaaagcc

SEQ ID NO: 251 - DNA, 24 bp, Artificial Sequence
  Synthetic construct
ccagggaagatgtagactatcacc

SEQ ID NO: 252 - DNA, 20 bp, Artificial Sequence
  Synthetic construct
cggcataatgggaaactgtg

SEQ ID NO: 253 - DNA, 21 bp, Artificial Sequence
  Synthetic construct
caatccaaatgcctctacagg

SEQ ID NO: 254 - DNA, 22 bp, Artificial Sequence
  Synthetic construct
acattcgttcccactcatctcc

SEQ ID NO: 255 - DNA, 22 bp, Artificial Sequence
  Synthetic construct
gaaatccaaattggtcacatcc

SEQ ID NO: 256 - DNA, 22 bp, Artificial Sequence
  Synthetic construct
aatgggaaactgtgtaggggtc

SEQ ID NO: 257 - DNA, 20 bp, Artificial Sequence
  Synthetic construct
gtccgggactcaatccaaat

SEQ ID NO: 258 - DNA, 21 bp, Artificial Sequence
  Synthetic construct
cctaagcactggcacaacagt

SEQ ID NO: 259 - DNA, 20 bp, Artificial Sequence
  Synthetic construct
acacggtccgggactcaatc

SEQ ID NO: 260 - DNA, 23 bp, Artificial Sequence
  Synthetic construct
ctccaacggcataatgggaaact

SEQ ID NO: 261 - DNA, 20 bp, Artificial Sequence
  Synthetic construct
acctgtacccacacggtccg

SEQ ID NO: 262 - DNA, 23 bp, Artificial Sequence
  Synthetic construct
cccactcatctccaacggcataa

SEQ ID NO: 263 - DNA, 27 bp, Artificial Sequence
  Synthetic construct
aagatgtagactatcacctgtacccac

SEQ ID NO: 264 - DNA, 21 bp, Artificial Sequence
  Synthetic construct
gcctgattcagacattcgttc

SEQ ID NO: 265 - DNA, 22 bp, Artificial Sequence
  Synthetic construct
tggtcacatccccagggaagat

SEQ ID NO: 266 - DNA, 27 bp, Artificial Sequence
  Synthetic construct
caacggcataatgggaaactgtgtagg

SEQ ID NO: 267 - DNA, 20 bp, Artificial Sequence
  Synthetic construct
tacccacacggtccgggact

SEQ ID NO: 268 - DNA, 27 bp, Artificial Sequence
  Synthetic construct
ctaagcactggcacaacagtttaaagc

SEQ ID NO: 269 - DNA, 23 bp, Artificial Sequence
  Synthetic construct
acatccccagggaagatgtagac

SEQ ID NO: 270 - DNA, 24 bp, Artificial Sequence
  Synthetic construct
tttaaagcctgattcagacattcg

SEQ ID NO: 271 - DNA, 21 bp, Artificial Sequence
  Synthetic construct
aggtgaggaaatccaaattgg

SEQ ID NO: 272 - DNA, 20 bp, Artificial Sequence
  Synthetic construct
ttccaaagcctaagcactgg

SEQ ID NO: 273 - DNA, 20 bp, Artificial Sequence
  Synthetic construct
gccgaatgtaggtgaggaaa

SEQ ID NO: 274 - DNA, 21 bp, Artificial Sequence
  Synthetic construct
gaccacttccaaagcctaagc

SEQ ID NO: 275 - DNA, 26 bp, Artificial Sequence
  Synthetic construct
ccgaatgtaggtgaggaaatccaaat

SEQ ID NO: 276 - DNA, 24 bp, Artificial Sequence
  Synthetic construct
ccaaagcctaagcactggcacaac

SEQ ID NO: 277 - DNA, 21 bp, Artificial Sequence
  Synthetic construct
aataatcagaagagcgagccc

SEQ ID NO: 278 - DNA, 20 bp, Artificial Sequence
  Synthetic construct
actgggttgctgaccagaag

SEQ ID NO: 279 - DNA, 19 bp, Artificial Sequence
  Synthetic construct
cccctgattggaaggaaaa

SEQ ID NO: 280 - DNA, 21 bp, Artificial Sequence
  Synthetic construct
ctcaaagatcatttgttgccc

SEQ ID NO: 281 - DNA, 20 bp, Artificial Sequence
  Synthetic construct
agaagagcgagcccctgatt

SEQ ID NO: 282 - DNA, 20 bp, Artificial Sequence
  Synthetic construct
tccgcctaaaaccatgttcc

SEQ ID NO: 283 - DNA, 23 bp, Artificial Sequence
  Synthetic construct
cctgattggaaggaaaaagacag

SEQ ID NO: 284 - DNA, 20 bp, Artificial Sequence
  Synthetic construct
ggtatggtcttggcctatgc

SEQ ID NO: 285 - DNA, 20 bp, Artificial Sequence
  Synthetic construct
agcgagcccctgattggaag

SEQ ID NO: 286 - DNA, 20 bp, Artificial Sequence
  Synthetic construct
atttgttgcccaacactggg

SEQ ID NO: 287 - DNA, 27 bp, Artificial Sequence
  Synthetic construct
ataatcagaagagcgagcccctgattg

SEQ ID NO: 288 - DNA, 19 bp, Artificial Sequence
  Synthetic construct
cgttgtgggcggtgtggtc

SEQ ID NO: 289 - DNA, 23 bp, Artificial Sequence
  Synthetic construct
caatttatgtcattgccctgaag

SEQ ID NO: 290 - DNA, 22 bp, Artificial Sequence
  Synthetic construct
ggaagctgaataccatttccag

SEQ ID NO: 291 - DNA, 21 bp, Artificial Sequence
  Synthetic construct
ccgggaaccgaatatacaatt

SEQ ID NO: 292 - DNA, 22 bp, Artificial Sequence
  Synthetic construct
accatttccagtgtcataccca

SEQ ID NO: 293 - DNA, 24 bp, Artificial Sequence
  Synthetic construct
gccctgaagaataatcagaagagc

SEQ ID NO: 294 - DNA, 20 bp, Artificial Sequence
  Synthetic construct
tgaccagaagtgccaggaag

SEQ ID NO: 295 - DNA, 23 bp, Artificial Sequence
  Synthetic construct
tgtcattgccctgaagaataatc

SEQ ID NO: 296 - DNA, 22 bp, Artificial Sequence
  Synthetic construct
gaagtgccaggaagctgaatac

SEQ ID NO: 297 - DNA, 20 bp, Artificial Sequence
  Synthetic construct
tggaaccgggaaccgaatat

SEQ ID NO: 298 - DNA, 20 bp, Artificial Sequence
  Synthetic construct
cttggcctatgccttatggg

SEQ ID NO: 299 - DNA, 27 bp, Artificial Sequence
  Synthetic construct
aaccgaatatacaatttatgtcattgc

SEQ ID NO: 300 - DNA, 23 bp, Artificial Sequence
  Synthetic construct
ccatgttcctcaaagatcatttg

SEQ ID NO: 301 - DNA, 27 bp, Artificial Sequence
  Synthetic construct
cctggaaccgggaaccgaatatacaat

SEQ ID NO: 302 - DNA, 27 bp, Artificial Sequence
  Synthetic construct
ggtatggtcttggcctatgccttatgg

SEQ ID NO: 303 - DNA, 22 bp, Artificial Sequence
  Synthetic construct
catcaagtatgagaagcctggg

SEQ ID NO: 304 - DNA, 18 bp, Artificial Sequence
  Synthetic construct
agggtgggtgacgaaagg

SEQ ID NO: 305 - DNA, 22 bp, Artificial Sequence
  Synthetic construct
caggattaccggctacatcatc

SEQ ID NO: 306 - DNA, 20 bp, Artificial Sequence
  Synthetic construct
gtgacgaaaggggtcttttg

SEQ ID NO: 307 - DNA, 23 bp, Artificial Sequence
  Synthetic construct
cctggtgtcacagaggctactat

SEQ ID NO: 308 - DNA, 20 bp, Artificial Sequence
  Synthetic construct
ctacattcggcgggtatggt

SEQ ID NO: 309 - DNA, 19 bp, Artificial Sequence
  Synthetic construct
cacacccaattccttgctg

SEQ ID NO: 310 - DNA, 24 bp, Artificial Sequence
  Synthetic construct
gctgaataccatttccagtgtcat

SEQ ID NO: 311 - DNA, 20 bp, Artificial Sequence
  Synthetic construct
ttccttgctggtatcatggc

SEQ ID NO: 312 - DNA, 19 bp, Artificial Sequence
  Synthetic construct
ccaacactgggttgctgac

SEQ ID NO: 313 - DNA, 21 bp, Artificial Sequence
  Synthetic construct
tctcctcccagagaagtggtc

SEQ ID NO: 314 - DNA, 23 bp, Artificial Sequence
  Synthetic construct
gcctaaaaccatgttcctcaaag

SEQ ID NO: 315 - DNA, 23 bp, Artificial Sequence
  Synthetic construct
ccggctacatcatcaagtatgag

SEQ ID NO: 316 - DNA, 20 bp, Artificial Sequence
  Synthetic construct
cagtgtcatacccagggtgg

SEQ ID NO: 317 - DNA, 21 bp, Artificial Sequence
  Synthetic construct
tatgagaagcctgggtctcct

SEQ ID NO: 318 - DNA, 19 bp, Artificial Sequence
  Synthetic construct
ggtgtggtccgcctaaaac

SEQ ID NO: 319 - DNA, 20 bp, Artificial Sequence
  Synthetic construct
cccaattccttgctggtatc

SEQ ID NO: 320 - DNA, 20 bp, Artificial Sequence
  Synthetic construct
gttgctgaccagaagtgcca

SEQ ID NO: 321 - DNA, 18 bp, Artificial Sequence
  Synthetic construct
ccacgtgccaggattacc

SEQ ID NO: 322 - DNA, 23 bp, Artificial Sequence
  Synthetic construct
aagatcatttgttgcccaacact

SEQ ID NO: 323 - DNA, 27 bp, Artificial Sequence
  Synthetic construct
gctacatcatcaagtatgagaagcctg

SEQ ID NO: 324 - DNA, 20 bp, Artificial Sequence
  Synthetic construct
tcatacccagggtgggtgac

SEQ ID NO: 325 - DNA, 19 bp, Artificial Sequence
  Synthetic construct
cagagaagtggtccctcgg

SEQ ID NO: 326 - DNA, 19 bp, Artificial Sequence
  Synthetic construct
ctatgccttatgggggtgg

SEQ ID NO: 327 - DNA, 20 bp, Artificial Sequence
  Synthetic construct
aagcctgggtctcctcccag

SEQ ID NO: 328 - DNA, 24 bp, Artificial Sequence
  Synthetic construct
gtgtggtccgcctaaaaccatgtt

SEQ ID NO: 329 - DNA, 20 bp, Artificial Sequence
  Synthetic construct
tgcaccatccaacctgcgtt

SEQ ID NO: 330 - DNA, 27 bp, Artificial Sequence
  Synthetic construct
agtgccaggaagctgaataccatttcc

SEQ ID NO: 331 - DNA, 20 bp, Artificial Sequence
  Synthetic construct
gcgtttcctggccaccacac

SEQ ID NO: 332 - DNA, 24 bp, Artificial Sequence
  Synthetic construct
atacccagggtgggtgacgaaagg

SEQ ID NO: 333 - DNA, 23 bp, Artificial Sequence
  Synthetic construct
cctgggtctcctcccagagaagt

SEQ ID NO: 334 - DNA, 20 bp, Artificial Sequence
  Synthetic construct
ttatgggggtggccgttgtg

SEQ ID NO: 335 - DNA, 20 bp, Artificial Sequence
  Synthetic construct
cccgccctggtgtcacagag

SEQ ID NO: 336 - DNA, 20 bp, Artificial Sequence
  Synthetic construct
ttcggcgggtatggtcttgg

SEQ ID NO: 337 - DNA, 18 bp, Artificial Sequence
  Synthetic construct
ctggtatcatggcagccg

SEQ ID NO: 338 - DNA, 20 bp, Artificial Sequence
  Synthetic construct
tttcctcacctacattcggc

SEQ ID NO: 339 - DNA, 20 bp, Artificial Sequence
  Synthetic construct
catgcagtggatcattgagg

SEQ ID NO: 340 - DNA, 21 bp, Artificial Sequence
  Synthetic construct
accttcctctgcgatcttgtc

SEQ ID NO: 341 - DNA, 20 bp, Artificial Sequence
  Synthetic construct
ctcccacctcttcatccaag

SEQ ID NO: 342 - DNA, 20 bp, Artificial Sequence
  Synthetic construct
tccagacccttgtcccttga

SEQ ID NO: 343 - DNA, 22 bp, Artificial Sequence
  Synthetic construct
cagaagtagtacgccacaacga

SEQ ID NO: 344 - DNA, 21 bp, Artificial Sequence
  Synthetic construct
ccatgagaactccagaccctt

SEQ ID NO: 345 - DNA, 20 bp, Artificial Sequence
  Synthetic construct
ccacaacgatgctgtcacac

SEQ ID NO: 346 - DNA, 20 bp, Artificial Sequence
  Synthetic construct
ttcatccaagaccccaccat

SEQ ID NO: 347 - DNA, 20 bp, Artificial Sequence
  Synthetic construct
tcagcagctccttgaactgg

SEQ ID NO: 348 - DNA, 20 bp, Artificial Sequence
  Synthetic construct
acgtctggaggaggaagaaa

SEQ ID NO: 349 - DNA, 20 bp, Artificial Sequence
  Synthetic construct
tagctgccctttttggtcag

SEQ ID NO: 350 - DNA, 18 bp, Artificial Sequence
  Synthetic construct
ggacgaggaagccacagc

SEQ ID NO: 351 - DNA, 20 bp, Artificial Sequence
  Synthetic construct
agtacgccacaacgatgctg

SEQ ID NO: 352 - DNA, 20 bp, Artificial Sequence
  Synthetic construct
acctcttcatccaagacccc

SEQ ID NO: 353 - DNA, 20 bp, Artificial Sequence
  Synthetic construct
tttggtcagcagctccttga

SEQ ID NO: 354 - DNA, 20 bp, Artificial Sequence
  Synthetic construct
cagccctcccacctcttcat

SEQ ID NO: 355 - DNA, 18 bp, Artificial Sequence
  Synthetic construct
ccgcccaccttcctctgc

SEQ ID NO: 356 - DNA, 19 bp, Artificial Sequence
  Synthetic construct
agctcccaaccccctaacc

SEQ ID NO: 357 - DNA, 18 bp, Artificial Sequence
  Synthetic construct
gatgctgtcacacggctg

SEQ ID NO: 358 - DNA, 20 bp, Artificial Sequence
  Synthetic construct
cgagcaccctccaagcagag

SEQ ID NO: 359 - DNA, 20 bp, Artificial Sequence
  Synthetic construct
tccttgaactggcccagggt

SEQ ID NO: 360 - DNA, 20 bp, Artificial Sequence
  Synthetic construct
aaagagagccagccgagcac

SEQ ID NO: 361 - DNA, 19 bp, Artificial Sequence
  Synthetic construct
cctcaccagggtgcggtag

SEQ ID NO: 362 - DNA, 20 bp, Artificial Sequence
  Synthetic construct
acccttgtcccttgagcacc

SEQ ID NO: 363 - DNA, 18 bp, Artificial Sequence
  Synthetic construct
cacacggctgggcactcc

SEQ ID NO: 364 - DNA, 18 bp, Artificial Sequence
  Synthetic construct
acctccgtgcagccctcc

SEQ ID NO: 365 - DNA, 27 bp, Artificial Sequence
  Synthetic construct
gaagtagtacgccacaacgatgctgtc

SEQ ID NO: 366 - DNA, 19 bp, Artificial Sequence
  Synthetic construct
taacccagctggaggaggc

SEQ ID NO: 367 - DNA, 18 bp, Artificial Sequence
  Synthetic construct
agggtgcggtaggggatg

SEQ ID NO: 368 - DNA, 24 bp, Artificial Sequence
  Synthetic construct
tgagaactccagacccttgtccct

SEQ ID NO: 369 - DNA, 18 bp, Artificial Sequence
  Synthetic construct
actcccgccgcccacctt

SEQ ID NO: 370 - DNA, 18 bp, Artificial Sequence
  Synthetic construct
aagaccccaccatgccac

SEQ ID NO: 371 - DNA, 20 bp, Artificial Sequence
  Synthetic construct
ccctttttggtcagcagctc

SEQ ID NO: 372 - DNA, 20 bp, Artificial Sequence
  Synthetic construct
agccacagccccatgagaac

SEQ ID NO: 373 - DNA, 20 bp, Artificial Sequence
  Synthetic construct
atgggttccccgcagaagta

SEQ ID NO: 374 - DNA, 20 bp, Artificial Sequence
  Synthetic construct
ttcggggacgaggaagccac

SEQ ID NO: 375 - DNA, 20 bp, Artificial Sequence
  Synthetic construct
gctgtcacacggctgggcac

SEQ ID NO: 376 - DNA, 18 bp, Artificial Sequence
  Synthetic construct
cgccgacgtctggaggag

SEQ ID NO: 377 - DNA, 20 bp, Artificial Sequence
  Synthetic construct
gaactggcccagggtgacag

SEQ ID NO: 378 - DNA, 19 bp, Artificial Sequence
  Synthetic construct
accatgccaccccacccag

SEQ ID NO: 379 - DNA, 27 bp, Artificial Sequence
  Synthetic construct
ctttttggtcagcagctccttgaactg

SEQ ID NO: 380 - DNA, 20 bp, Artificial Sequence
  Synthetic construct
ctcagctccggacctccgtg

SEQ ID NO: 381 - DNA, 20 bp, Artificial Sequence
  Synthetic construct
gtaggggatgggttccccgc

SEQ ID NO: 382 - DNA, 24 bp, Artificial Sequence
  Synthetic construct
ggaagaaaagagagccagccgagc

SEQ ID NO: 383 - DNA, 18 bp, Artificial Sequence
  Synthetic construct
cggcccctcaccagggtg

SEQ ID NO: 384 - DNA, 18 bp, Artificial Sequence
  Synthetic construct
caaccccctaacccagct

SEQ ID NO: 385 - DNA, 21 bp, Artificial Sequence
  Synthetic construct
acagtcaaactcgtcgctcac

SEQ ID NO: 386 - DNA, 18 bp, Artificial Sequence
  Synthetic construct
cccacccagctcccaacc

SEQ ID NO: 387 - DNA, 24 bp, Artificial Sequence
  Synthetic construct
gtcaaactcgtcgctcactttctt

SEQ ID NO: 388 - DNA, 20 bp, Artificial Sequence
  Synthetic construct
ccagccgagcaccctccaag

SEQ ID NO: 389 - DNA, 20 bp, Artificial Sequence
  Synthetic construct
gacggcctcgtcctctcgaa

SEQ ID NO: 390 - DNA, 20 bp, Artificial Sequence
  Synthetic construct
ccccctaacccagctggagg

SEQ ID NO: 391 - DNA, 27 bp, Artificial Sequence
  Synthetic construct
aactcgtcgctcactttcttgaagtag

SEQ ID NO: 392 - DNA, 18 bp, Artificial Sequence
  Synthetic construct
cttgagcacccctgggcc

SEQ ID NO: 393 - DNA, 20 bp, Artificial Sequence
  Synthetic construct
ccaccccacagtcaaactcg

SEQ ID NO: 394 - DNA, 20 bp, Artificial Sequence
  Synthetic construct
aagagcactggccaagtcag

SEQ ID NO: 395 - DNA, 21 bp, Artificial Sequence
  Synthetic construct
cctccaggtgatgaataacca

SEQ ID NO: 396 - DNA, 26 bp, Artificial Sequence
  Synthetic construct
agaaacatccagaatacatttccaac

SEQ ID NO: 397 - DNA, 26 bp, Artificial Sequence
  Synthetic construct
ttttgagcataaaagagaccttcttc

SEQ ID NO: 398 - DNA, 20 bp, Artificial Sequence
  Synthetic construct
tttccaacaagagcactggc

SEQ ID NO: 399 - DNA, 21 bp, Artificial Sequence
  Synthetic construct
ttgacaatcctccaggtgatg

SEQ ID NO: 400 - DNA, 24 bp, Artificial Sequence
  Synthetic construct
tccaacaagagcactggccaagtc

SEQ ID NO: 401 - DNA, 27 bp, Artificial Sequence
  Synthetic construct
tgacaatcctccaggtgatgaataacc

SEQ ID NO: 402 - DNA, 27 bp, Artificial Sequence
  Synthetic construct
aatacatttccaacaagagcactggcc

SEQ ID NO: 403 - DNA, 27 bp, Artificial Sequence
  Synthetic construct
ctccaggtgatgaataaccattaatgg

SEQ ID NO: 404 - DNA, 19 bp, Artificial Sequence
  Synthetic construct
cgagaaggcagaggaggag

SEQ ID NO: 405 - DNA, 20 bp, Artificial Sequence
  Synthetic construct
caaacttgctggaaaggctc

SEQ ID NO: 406 - DNA, 22 bp, Artificial Sequence
  Synthetic construct
gaaagaggaggaaggaagatgc

SEQ ID NO: 407 - DNA, 21 bp, Artificial Sequence
  Synthetic construct
gccaatcttgaacaaacttgc

SEQ ID NO: 408 - DNA, 20 bp, Artificial Sequence
  Synthetic construct
aagaaagaaagcgagggagg

SEQ ID NO: 409 - DNA, 19 bp, Artificial Sequence
  Synthetic construct
gaaaggctcagggaagctg

SEQ ID NO: 410 - DNA, 20 bp, Artificial Sequence
  Synthetic construct
gaaggaagatgcgagaaggc

SEQ ID NO: 411 - DNA, 22 bp, Artificial Sequence
  Synthetic construct
cagtccatgattcttgacagcc

SEQ ID NO: 412 - DNA, 20 bp, Artificial Sequence
  Synthetic construct
aagatgcgagaaggcagagg

SEQ ID NO: 413 - DNA, 26 bp, Artificial Sequence
  Synthetic construct
acaaggcatataataacagtccatga

SEQ ID NO: 414 - DNA, 20 bp, Artificial Sequence
  Synthetic construct
aaagcgagggagggaaagag

SEQ ID NO: 415 - DNA, 22 bp, Artificial Sequence
  Synthetic construct
ttgacagccaatcttgaacaaa

SEQ ID NO: 416 - DNA, 24 bp, Artificial Sequence
  Synthetic construct
gaggaggaaggaagatgcgagaag

SEQ ID NO: 417 - DNA, 21 bp, Artificial Sequence
  Synthetic construct
ttgctggaaaggctcagggaa

SEQ ID NO: 418 - DNA, 19 bp, Artificial Sequence
  Synthetic construct
agcccggcccggaagctag

SEQ ID NO: 419 - DNA, 19 bp, Artificial Sequence
  Synthetic construct
atggctcgcgcctcctagc

SEQ ID NO: 420 - DNA, 18 bp, Artificial Sequence
  Synthetic construct
ggaaggagcgcggagccc

SEQ ID NO: 421 - DNA, 20 bp, Artificial Sequence
  Synthetic construct
ctagcatggctcgcgcctcc

SEQ ID NO: 422 - DNA, 20 bp, Artificial Sequence
  Synthetic construct
accaccacacaatcaaagcg

SEQ ID NO: 423 - DNA, 20 bp, Artificial Sequence
  Synthetic construct
ttacgacgtttccgaagagg

SEQ ID NO: 424 - DNA, 23 bp, Artificial Sequence
  Synthetic construct
cccaagcaatacaagcattactg

SEQ ID NO: 425 - DNA, 23 bp, Artificial Sequence
  Synthetic construct
cccagagtttccatttcttcttc

SEQ ID NO: 426 - DNA, 20 bp, Artificial Sequence
  Synthetic construct
actgcatcaaagggagatgc

SEQ ID NO: 427 - DNA, 27 bp, Artificial Sequence
  Synthetic construct
ggagttatatctttacccagagtttcc

SEQ ID NO: 428 - DNA, 22 bp, Artificial Sequence
  Synthetic construct
acaagcattactgcatcaaagg

SEQ ID NO: 429 - DNA, 24 bp, Artificial Sequence
  Synthetic construct
tctttacccagagtttccatttct

SEQ ID NO: 430 - DNA, 20 bp, Artificial Sequence
  Synthetic construct
aaagcggaaaggccacttct

SEQ ID NO: 431 - DNA, 27 bp, Artificial Sequence
  Synthetic construct
tgtctcttcaatatcttcattgatagg

SEQ ID NO: 432 - DNA, 18 bp, Artificial Sequence
  Synthetic construct
caaagggagatgccgctt

SEQ ID NO: 433 - DNA, 27 bp, Artificial Sequence
  Synthetic construct
cattgataggagttatatctttaccca

SEQ ID NO: 434 - DNA, 23 bp, Artificial Sequence
  Synthetic construct
gccacttctctaggtgccccaag

SEQ ID NO: 435 - DNA, 26 bp, Artificial Sequence
  Synthetic construct
tcttctttcttttacgacgtttccga

SEQ ID NO: 436 - DNA, 19 bp, Artificial Sequence
  Synthetic construct
agcagacgccctcctgtgt

SEQ ID NO: 437 - DNA, 22 bp, Artificial Sequence
  Synthetic construct
ttcctgagacacattctgtcca

SEQ ID NO: 438 - DNA, 18 bp, Artificial Sequence
  Synthetic construct
gatgccgcttcgtggtgg

SEQ ID NO: 439 - DNA, 21 bp, Artificial Sequence
  Synthetic construct
caaatgagcaaggcactttgc

SEQ ID NO: 440 - DNA, 27 bp, Artificial Sequence
  Synthetic construct
aagcaatacaagcattactgcatcaaa

SEQ ID NO: 441 - DNA, 22 bp, Artificial Sequence
  Synthetic construct
caccaacctggaggtaacttca

SEQ ID NO: 442 - DNA, 20 bp, Artificial Sequence
  Synthetic construct
ttcgtggtggccgagcagac

SEQ ID NO: 443 - DNA, 20 bp, Artificial Sequence
  Synthetic construct
ggcactttgcagcttgccac

SEQ ID NO: 444 - DNA, 27 bp, Artificial Sequence
  Synthetic construct
aagcattactgcatcaaagggagatgc

SEQ ID NO: 445 - DNA, 20 bp, Artificial Sequence
  Synthetic construct
ttgcagcttgccaccaacct

SEQ ID NO: 446 - DNA, 20 bp, Artificial Sequence
  Synthetic construct
agggagatgccgcttcgtgg

SEQ ID NO: 447 - DNA, 22 bp, Artificial Sequence
  Synthetic construct
gagcaaggcactttgcagcttg

SEQ ID NO: 448 - DNA, 24 bp, Artificial Sequence
  Synthetic construct
acaatcaaagcggaaaggccactt

SEQ ID NO: 449 - DNA, 20 bp, Artificial Sequence
  Synthetic construct
gcttgccaccaacctggagg

SEQ ID NO: 450 - DNA, 27 bp, Artificial Sequence
  Synthetic construct
aaagcggaaaggccacttctctaggtg

SEQ ID NO: 451 - DNA, 26 bp, Artificial Sequence
  Synthetic construct
gtccattttcaaatgagcaaggcact

SEQ ID NO: 452 - DNA, 21 bp, Artificial Sequence
  Synthetic construct
agaccctgaggaaaactgtgc

SEQ ID NO: 453 - DNA, 22 bp, Artificial Sequence
  Synthetic construct
cctggaggtaacttcatagcct

SEQ ID NO: 454 - DNA, 20 bp, Artificial Sequence
  Synthetic construct
tcctctgtggagaccctgag

SEQ ID NO: 455 - DNA, 23 bp, Artificial Sequence
  Synthetic construct
agctgttttcctgagacacattc

SEQ ID NO: 456 - DNA, 20 bp, Artificial Sequence
  Synthetic construct
tgtggagaccctgaggaaaa

SEQ ID NO: 457 - DNA, 26 bp, Artificial Sequence
  Synthetic construct
gtctactagctgttttcctgagacac

SEQ ID NO: 458 - DNA, 20 bp, Artificial Sequence
  Synthetic construct
agccatggacaactgtttgg

SEQ ID NO: 459 - DNA, 24 bp, Artificial Sequence
  Synthetic construct
catgctctgatatttgatagctgc

SEQ ID NO: 460 - DNA, 20 bp, Artificial Sequence
  Synthetic construct
agccatggacaactgtttgg

SEQ ID NO: 461 - DNA, 22 bp, Artificial Sequence
  Synthetic construct
gactcgcctctgtgataacgat

SEQ ID NO: 462 - DNA, 21 bp, Artificial Sequence
  Synthetic construct
tctagaagtgctggagagggc

SEQ ID NO: 463 - DNA, 20 bp, Artificial Sequence
  Synthetic construct
aacgatagacatgggttgcc

SEQ ID NO: 464 - DNA, 21 bp, Artificial Sequence
  Synthetic construct
caaggctggctctagaagtgc

SEQ ID NO: 465 - DNA, 21 bp, Artificial Sequence
  Synthetic construct
gaccattccctatgtccaagc

SEQ ID NO: 466 - DNA, 20 bp, Artificial Sequence
  Synthetic construct
cccacctagagaaacagccg

SEQ ID NO: 467 - DNA, 20 bp, Artificial Sequence
  Synthetic construct
atgtccaagcacatgtgcag

SEQ ID NO: 468 - DNA, 20 bp, Artificial Sequence
  Synthetic construct
gttcagcaaggctggctcta

SEQ ID NO: 469 - DNA, 21 bp, Artificial Sequence
  Synthetic construct
cttcctctggcacagatgaat

SEQ ID NO: 470 - DNA, 18 bp, Artificial Sequence
  Synthetic construct
cctgcagcgttcagcaag

SEQ ID NO: 471 - DNA, 20 bp, Artificial Sequence
  Synthetic construct
tccctatgtccaagcacatg

SEQ ID NO: 472 - DNA, 20 bp, Artificial Sequence
  Synthetic construct
ctggagagggccaagaggag

SEQ ID NO: 473 - DNA, 20 bp, Artificial Sequence
  Synthetic construct
acatgtgcagcttcgactcg

SEQ ID NO: 474 - DNA, 18 bp, Artificial Sequence
  Synthetic construct
tgaatggggtggaccgac

SEQ ID NO: 475 - DNA, 24 bp, Artificial Sequence
  Synthetic construct
ctctgtgataacgatagacatggg

SEQ ID NO: 476 - DNA, 18 bp, Artificial Sequence
  Synthetic construct
accgacgttccctgcagc

SEQ ID NO: 477 - DNA, 19 bp, Artificial Sequence
  Synthetic construct
gttgcccctccttcctctg

SEQ ID NO: 478 - DNA, 20 bp, Artificial Sequence
  Synthetic construct
aagaggagggcggtggactg

SEQ ID NO: 479 - DNA, 20 bp, Artificial Sequence
  Synthetic construct
caagcacatgtgcagcttcg

SEQ ID NO: 480 - DNA, 18 bp, Artificial Sequence
  Synthetic construct
gtcccaaaggctgcatgg

SEQ ID NO: 481 - DNA, 20 bp, Artificial Sequence
  Synthetic construct
tagacatgggttgcccctcc

SEQ ID NO: 482 - DNA, 20 bp, Artificial Sequence
  Synthetic construct
acgttccctgcagcgttcag

SEQ ID NO: 483 - DNA, 19 bp, Artificial Sequence
  Synthetic construct
ccctccttcctctggcaca

SEQ ID NO: 484 - DNA, 18 bp, Artificial Sequence
  Synthetic construct
gactggcatgccctggag

SEQ ID NO: 485 - DNA, 26 bp, Artificial Sequence
  Synthetic construct
tcctctggcacagatgaataatattt

SEQ ID NO: 486 - DNA, 21 bp, Artificial Sequence
  Synthetic construct
atgccctggagcgtcccaaag

SEQ ID NO: 487 - DNA, 27 bp, Artificial Sequence
  Synthetic construct
accattccctatgtccaagcacatgtg

SEQ ID NO: 488 - DNA, 20 bp, Artificial Sequence
  Synthetic construct
gcagcgttcagcaaggctgg

SEQ ID NO: 489 - DNA, 27 bp, Artificial Sequence
  Synthetic construct
gataacgatagacatgggttgcccctc

SEQ ID NO: 490 - DNA, 20 bp, Artificial Sequence
  Synthetic construct
ctagagaaacagccggcagc

SEQ ID NO: 491 - DNA, 24 bp, Artificial Sequence
  Synthetic construct
catgctctgatatttgatagctgc

SEQ ID NO: 492 - DNA, 19 bp, Artificial Sequence
  Synthetic construct
ggagcgtcccaaaggctgc

SEQ ID NO: 493 - DNA, 20 bp, Artificial Sequence
  Synthetic construct
tgcctccaggaccaagggat

SEQ ID NO: 494 - DNA, 20 bp, Artificial Sequence
  Synthetic construct
aggcgccccacctagagaaa

SEQ ID NO: 495 - DNA, 21 bp, Artificial Sequence
  Synthetic construct
ccaggaccaagggatgtcttt

SEQ ID NO: 496 - DNA, 19 bp, Artificial Sequence
  Synthetic construct
agggcggtggactggcatg

SEQ ID NO: 497 - DNA, 20 bp, Artificial Sequence
  Synthetic construct
tgggatgcctctggagcatg

SEQ ID NO: 498 - DNA, 23 bp, Artificial Sequence
  Synthetic construct
gaagtgctggagagggccaagag

SEQ ID NO: 499 - DNA, 26 bp, Artificial Sequence
  Synthetic construct
tctgatatttgatagctgcctccagg

SEQ ID NO: 500 - DNA, 18 bp, Artificial Sequence
  Synthetic construct
ctgcatgggggtccttgc

SEQ ID NO: 501 - DNA, 23 bp, Artificial Sequence
  Synthetic construct
gcctctggagcatgctctgatat

SEQ ID NO: 502 - DNA, 18 bp, Artificial Sequence
  Synthetic construct
aaaggctgcatgggggtc

SEQ ID NO: 503 - DNA, 20 bp, Artificial Sequence
  Synthetic construct
atagctgcctccaggaccaa

SEQ ID NO: 504 - DNA, 18 bp, Artificial Sequence
  Synthetic construct
ggtggaccgacgttccct

SEQ ID NO: 505 - DNA, 27 bp, Artificial Sequence
  Synthetic construct
tctggagcatgctctgatatttgatag

SEQ ID NO: 506 - DNA, 19 bp, Artificial Sequence
  Synthetic construct
agcgctgaatggggtggac

SEQ ID NO: 507 - DNA, 27 bp, Artificial Sequence
  Synthetic construct
gtagaggtccttagagatgttctcagc

SEQ ID NO: 508 - DNA, 20 bp, Artificial Sequence
  Synthetic construct
tgttcaaggccaaggtgaag

SEQ ID NO: 509 - DNA, 22 bp, Artificial Sequence
  Synthetic construct
tcaaagaagtaggaccgagagg

SEQ ID NO: 510 - DNA, 21 bp, Artificial Sequence
  Synthetic construct
cagtagctcccacacgaagag

SEQ ID NO: 511 - DNA, 18 bp, Artificial Sequence
  Synthetic construct
gccaaggtgaagcgtcgg

SEQ ID NO: 512 - DNA, 20 bp, Artificial Sequence
  Synthetic construct
agggtggtgggcagtagctc

SEQ ID NO: 513 - DNA, 18 bp, Artificial Sequence
  Synthetic construct
ggagatgagccgaggctt

SEQ ID NO: 514 - DNA, 19 bp, Artificial Sequence
  Synthetic construct
ggaagaagcccaccagcag

SEQ ID NO: 515 - DNA, 20 bp, Artificial Sequence
  Synthetic construct
aagcgtcggccggagatgag

SEQ ID NO: 516 - DNA, 19 bp, Artificial Sequence
  Synthetic construct
cccaccagcagggtggtgg

SEQ ID NO: 517 - DNA, 21 bp, Artificial Sequence
  Synthetic construct
tcaccttgacgcttatgaacc

SEQ ID NO: 518 - DNA, 20 bp, Artificial Sequence
  Synthetic construct
aggtagcctttgttccccag

SEQ ID NO: 519 - DNA, 20 bp, Artificial Sequence
  Synthetic construct
tgcagttcttcaccttgacg

SEQ ID NO: 520 - DNA, 20 bp, Artificial Sequence
  Synthetic construct
ttgttccccaggtcattcac

SEQ ID NO: 521 - DNA, 23 bp, Artificial Sequence
  Synthetic construct
cgcttatgaacctctactttgcc

SEQ ID NO: 522 - DNA, 22 bp, Artificial Sequence
  Synthetic construct
gccaaataccaggtagcctttg

SEQ ID NO: 523 - DNA, 20 bp, Artificial Sequence
  Synthetic construct
cgtctgcctgcagttcttca

SEQ ID NO: 524 - DNA, 20 bp, Artificial Sequence
  Synthetic construct
ccaggtcattcaccaggtcc

SEQ ID NO: 525 - DNA, 27 bp, Artificial Sequence
  Synthetic construct
caccttgacgcttatgaacctctactt

SEQ ID NO: 526 - DNA, 24 bp, Artificial Sequence
  Synthetic construct
gtagcctttgttccccaggtcatt

SEQ ID NO: 527 - DNA, 20 bp, Artificial Sequence
  Synthetic construct
actccctgttcgtcatctgc

SEQ ID NO: 528 - DNA, 20 bp, Artificial Sequence
  Synthetic construct
ttgttccccaggtcattcac

SEQ ID NO: 529 - DNA, 18 bp, Artificial Sequence
  Synthetic construct
cgcgctgtctcttgctgc

SEQ ID NO: 530 - DNA, 22 bp, Artificial Sequence
  Synthetic construct
gccaaataccaggtagcctttg

SEQ ID NO: 531 - DNA, 20 bp, Artificial Sequence
  Synthetic construct
gcgccctccactagcatcta

SEQ ID NO: 532 - DNA, 19 bp, Artificial Sequence
  Synthetic construct
ggaagaagcccaccagcag

SEQ ID NO: 533 - DNA, 20 bp, Artificial Sequence
  Synthetic construct
tgagcgactccctgttcgtc

SEQ ID NO: 534 - DNA, 20 bp, Artificial Sequence
  Synthetic construct
ccaggtcattcaccaggtcc

SEQ ID NO: 535 - DNA, 18 bp, Artificial Sequence
  Synthetic construct
tcttgctgcctgcctctg

SEQ ID NO: 536 - DNA, 21 bp, Artificial Sequence
  Synthetic construct
cagtagctcccacacgaagag

SEQ ID NO: 537 - DNA, 18 bp, Artificial Sequence
  Synthetic construct
gttcgtcatctgcgcgct

SEQ ID NO: 538 - DNA, 20 bp, Artificial Sequence
  Synthetic construct
aggtagcctttgttccccag

SEQ ID NO: 539 - DNA, 18 bp, Artificial Sequence
  Synthetic construct
ctctgcctcgtcgccagg

SEQ ID NO: 540 - DNA, 20 bp, Artificial Sequence
  Synthetic construct
agggtggtgggcagtagctc

SEQ ID NO: 541 - DNA, 21 bp, Artificial Sequence
  Synthetic construct
gtcatctgcgcgctgtctctt

SEQ ID NO: 542 - DNA, 24 bp, Artificial Sequence
  Synthetic construct
gtagcctttgttccccaggtcatt

SEQ ID NO: 543 - DNA, 24 bp, Artificial Sequence
  Synthetic construct
gccctccactagcatctacctgga

SEQ ID NO: 544 - DNA, 19 bp, Artificial Sequence
  Synthetic construct
cccaccagcagggtggtgg

SEQ ID NO: 545 - DNA, 20 bp, Artificial Sequence
  Synthetic construct
ctgtctcttgctgcctgcct

SEQ ID NO: 546 - DNA, 20 bp, Artificial Sequence
  Synthetic construct
ggatgaggccaaataccagg

SEQ ID NO: 547 - DNA, 18 bp, Artificial Sequence
  Synthetic construct
gcctgcctctgcctcgtc

SEQ ID NO: 548 - DNA, 21 bp, Artificial Sequence
  Synthetic construct
ctcccacacgaagaggatgag

SEQ ID NO: 549 - DNA, 20 bp, Artificial Sequence
  Synthetic construct
gcatctacctggaggccaag

SEQ ID NO: 550 - DNA, 18 bp, Artificial Sequence
  Synthetic construct
gtgcacccggaagaagcc

SEQ ID NO: 551 - DNA, 20 bp, Artificial Sequence
  Synthetic construct
gtcctggtgagcgactccct

SEQ ID NO: 552 - DNA, 20 bp, Artificial Sequence
  Synthetic construct
cgaagaggatgaggccaaat

SEQ ID NO: 553 - DNA, 18 bp, Artificial Sequence
  Synthetic construct
ctgctgcttgtccgcgtc

SEQ ID NO: 554 - DNA, 24 bp, Artificial Sequence
  Synthetic construct
aataccaggtagcctttgttcccc

SEQ ID NO: 555 - DNA, 18 bp, Artificial Sequence
  Synthetic construct
tgggccctgctgcttgtc

SEQ ID NO: 556 - DNA, 20 bp, Artificial Sequence
  Synthetic construct
gtgggcagtagctcccacac

SEQ ID NO: 557 - DNA, 19 bp, Artificial Sequence
  Synthetic construct
tgtgctgtgctctcccatc

SEQ ID NO: 558 - DNA, 21 bp, Artificial Sequence
  Synthetic construct
cagtagctcccacacgaagag

SEQ ID NO: 559 - DNA, 20 bp, Artificial Sequence
  Synthetic construct
cttgtccgcgtcctggtgag

SEQ ID NO: 560 - DNA, 18 bp, Artificial Sequence
  Synthetic construct
gtcctgtgggggccggtg

SEQ ID NO: 561 - DNA, 20 bp, Artificial Sequence
  Synthetic construct
cttgctgcctgcctctgcct

SEQ ID NO: 562 - DNA, 20 bp, Artificial Sequence
  Synthetic construct
cacccggaagaagcccacca

SEQ ID NO: 563 - DNA, 20 bp, Artificial Sequence
  Synthetic construct
gtgctgtgtgctgtgctctc

SEQ ID NO: 564 - DNA, 20 bp, Artificial Sequence
  Synthetic construct
attgaggatgtggctggtgc

SEQ ID NO: 565 - DNA, 20 bp, Artificial Sequence
  Synthetic construct
tctttctgctggtgaacgtg

SEQ ID NO: 566 - DNA, 19 bp, Artificial Sequence
  Synthetic construct
ctgcccattgaggatgtgg

SEQ ID NO: 567 - DNA, 18 bp, Artificial Sequence
  Synthetic construct
acagccctgggccctgct

SEQ ID NO: 568 - DNA, 20 bp, Artificial Sequence
  Synthetic construct
aggcaaagacctgcccattg

SEQ ID NO: 569 - DNA, 18 bp, Artificial Sequence
  Synthetic construct
gtgctctcccatcggcgc

SEQ ID NO: 570 - DNA, 23 bp, Artificial Sequence
  Synthetic construct
caaagacctgcccattgaggatg

SEQ ID NO: 571 - DNA, 23 bp, Artificial Sequence
  Synthetic construct
agttcttcaccttgacgcttatg

SEQ ID NO: 572 - DNA, 21 bp, Artificial Sequence
  Synthetic construct
ctcccacacgaagaggatgag

SEQ ID NO: 573 - DNA, 19 bp, Artificial Sequence
  Synthetic construct
ggcttctctactgctgccc

SEQ ID NO: 574 - DNA, 20 bp, Artificial Sequence
  Synthetic construct
ggatgaggccaaataccagg

SEQ ID NO: 575 - DNA, 22 bp, Artificial Sequence
  Synthetic construct
ccttgcccttctggcttctcta

SEQ ID NO: 576 - DNA, 24 bp, Artificial Sequence
  Synthetic construct
aataccaggtagcctttgttcccc

SEQ ID NO: 577 - DNA, 22 bp, Artificial Sequence
  Synthetic construct
ccttctggcttctctactgctg

SEQ ID NO: 578 - DNA, 20 bp, Artificial Sequence
  Synthetic construct
cgaagaggatgaggccaaat

SEQ ID NO: 579 - DNA, 19 bp, Artificial Sequence
  Synthetic construct
tctactgctgccccgtctg

SEQ ID NO: 580 - DNA, 20 bp, Artificial Sequence
  Synthetic construct
gtgggcagtagctcccacac

SEQ ID NO: 581 - DNA, 19 bp, Artificial Sequence
  Synthetic construct
agatactccccgcgccaac

SEQ ID NO: 582 - DNA, 18 bp, Artificial Sequence
  Synthetic construct
gtgcacccggaagaagcc

SEQ ID NO: 583 - DNA, 18 bp, Artificial Sequence
  Synthetic construct
ctgccccgtctgcctgca

SEQ ID NO: 584 - DNA, 20 bp, Artificial Sequence
  Synthetic construct
cacccggaagaagcccacca

SEQ ID NO: 585 - DNA, 19 bp, Artificial Sequence
  Synthetic construct
tggggcccttgcccttctg

SEQ ID NO: 586 - DNA, 18 bp, Artificial Sequence
  Synthetic construct
gtcctgtgggggccggtg

SEQ ID NO: 587 - DNA, 22 bp, Artificial Sequence
  Synthetic construct
cacagggagaccttttacttgg

SEQ ID NO: 588 - DNA, 20 bp, Artificial Sequence
  Synthetic construct
tcaaggcagtcaacatccag

SEQ ID NO: 589 - DNA, 20 bp, Artificial Sequence
  Synthetic construct
atcctccaaagttgcaccag

SEQ ID NO: 590 - DNA, 20 bp, Artificial Sequence
  Synthetic construct
gcaccagtttgcgtatgtga

SEQ ID NO: 591 - DNA, 20 bp, Artificial Sequence
  Synthetic construct
atgatacaaggccgaagcag

SEQ ID NO: 592 - DNA, 21 bp, Artificial Sequence
  Synthetic construct
gacagatggagcttgttcagg

SEQ ID NO: 593 - DNA, 23 bp, Artificial Sequence
  Synthetic construct
gatgacgagaaatgatacaaggc

SEQ ID NO: 594 - DNA, 21 bp, Artificial Sequence
  Synthetic construct
ttgcgtatgtgacagatggag

SEQ ID NO: 595 - DNA, 20 bp, Artificial Sequence
  Synthetic construct
gccgaagcagcaagtatacc

SEQ ID NO: 596 - DNA, 22 bp, Artificial Sequence
  Synthetic construct
ggagcttgttcaggagatgaaa

SEQ ID NO: 597 - DNA, 21 bp, Artificial Sequence
  Synthetic construct
tgcatcaattcagatgacgag

SEQ ID NO: 598 - DNA, 20 bp, Artificial Sequence
  Synthetic construct
ccaaagttgcaccagtttgc

SEQ ID NO: 599 - DNA, 22 bp, Artificial Sequence
  Synthetic construct
accataaggaaattcaaggcag

SEQ ID NO: 600 - DNA, 24 bp, Artificial Sequence
  Synthetic construct
gaaatctatcctccaaagttgcac

SEQ ID NO: 601 - DNA, 22 bp, Artificial Sequence
  Synthetic construct
gtcaacatccaggacacagaga

SEQ ID NO: 602 - DNA, 22 bp, Artificial Sequence
  Synthetic construct
ggagatgaaattctcaccatgg

SEQ ID NO: 603 - DNA, 22 bp, Artificial Sequence
  Synthetic construct
tgaaaccttttgcatcaattca

SEQ ID NO: 604 - DNA, 24 bp, Artificial Sequence
  Synthetic construct
gtatgtgacagatggagcttgttc

SEQ ID NO: 605 - DNA, 24 bp, Artificial Sequence
  Synthetic construct
tcaattcagatgacgagaaatgat

SEQ ID NO: 606 - DNA, 24 bp, Artificial Sequence
  Synthetic construct
accagtttgcgtatgtgacagatg

SEQ ID NO: 607 - DNA, 22 bp, Artificial Sequence
  Synthetic construct
tacaaggccgaagcagcaagta

SEQ ID NO: 608 - DNA, 24 bp, Artificial Sequence
  Synthetic construct
aaagttgcaccagtttgcgtatgt

SEQ ID NO: 609 - DNA, 22 bp, Artificial Sequence
  Synthetic construct
aggaaattcaaggcagtcaaca

SEQ ID NO: 610 - DNA, 24 bp, Artificial Sequence
  Synthetic construct
tgttcaggagatgaaattctcacc

SEQ ID NO: 611 - DNA, 24 bp, Artificial Sequence
  Synthetic construct
accttttgcatcaattcagatgac

SEQ ID NO: 612 - DNA, 27 bp, Artificial Sequence
  Synthetic construct
ctatcctccaaagttgcaccagtttgc

SEQ ID NO: 613 - DNA, 24 bp, Artificial Sequence
  Synthetic construct
cgagaaatgatacaaggccgaagc

SEQ ID NO: 614 - DNA, 27 bp, Artificial Sequence
  Synthetic construct
agatgaaattctcaccatggaattaat

SEQ ID NO: 615 - DNA, 24 bp, Artificial Sequence
  Synthetic construct
cgaagcagcaagtataccataagg

SEQ ID NO: 616 - DNA, 22 bp, Artificial Sequence
  Synthetic construct
cacagggagaccttttacttgg

SEQ ID NO: 617 - DNA, 21 bp, Artificial Sequence
  Synthetic construct
ccaggacacagagatccaaca

SEQ ID NO: 618 - DNA, 24 bp, Artificial Sequence
  Synthetic construct
gggagaccttttacttggcacaag

SEQ ID NO: 619 - DNA, 24 bp, Artificial Sequence
  Synthetic construct
aaggcagtcaacatccaggacaca

SEQ ID NO: 620 - DNA, 24 bp, Artificial Sequence
  Synthetic construct
ttatttattgcagccaaacttgag

SEQ ID NO: 621 - DNA, 22 bp, Artificial Sequence
  Synthetic construct
acacagttctctatgtcgcacc

SEQ ID NO: 622 - DNA, 24 bp, Artificial Sequence
  Synthetic construct
acagcttattgggatttcatcttt

SEQ ID NO: 623 - DNA, 25 bp, Artificial Sequence
  Synthetic construct
ccacttgacacagttctctatgtcg

SEQ ID NO: 624 - DNA, 26 bp, Artificial Sequence
  Synthetic construct
actcttttacagcttattgggatttc

SEQ ID NO: 625 - DNA, 20 bp, Artificial Sequence
  Synthetic construct
tggaaccatccacttgacac

SEQ ID NO: 626 - DNA, 21 bp, Artificial Sequence
  Synthetic construct
ggcgacacaagaaaatgttgt

SEQ ID NO: 627 - DNA, 20 bp, Artificial Sequence
  Synthetic construct
taaccatggcaaatggaacc

SEQ ID NO: 628 - DNA, 21 bp, Artificial Sequence
  Synthetic construct
ttctttgaccggtatatggcg

SEQ ID NO: 629 - DNA, 27 bp, Artificial Sequence
  Synthetic construct
acagttctctatgtcgcaccactgata

SEQ ID NO: 630 - DNA, 20 bp, Artificial Sequence
  Synthetic construct
cggtatatggcgacacaaga

SEQ ID NO: 631 - DNA, 22 bp, Artificial Sequence
  Synthetic construct
cccttataaccatggcaaatgg

SEQ ID NO: 632 - DNA, 24 bp, Artificial Sequence
  Synthetic construct
tttgaccggtatatggcgacacaa

SEQ ID NO: 633 - DNA, 27 bp, Artificial Sequence
  Synthetic construct
aatggaaccatccacttgacacagttc

SEQ ID NO: 634 - DNA, 26 bp, Artificial Sequence
  Synthetic construct
ggtatatggcgacacaagaaaatgtt

SEQ ID NO: 635 - DNA, 27 bp, Artificial Sequence
  Synthetic construct
cttataaccatggcaaatggaaccatc

SEQ ID NO: 636 - DNA, 20 bp, Artificial Sequence
  Synthetic construct
tctgcagccaaaaatgcgag

SEQ ID NO: 637 - DNA, 27 bp, Artificial Sequence
  Synthetic construct
gaaattcaaggcagtcaacatccagga

SEQ ID NO: 638 - DNA, 23 bp, Artificial Sequence
  Synthetic construct
cagctctcaatgttgaaacagaa

SEQ ID NO: 639 - DNA, 21 bp, Artificial Sequence
  Synthetic construct
tctggctttaagtcacggtgt

SEQ ID NO: 640 - DNA, 23 bp, Artificial Sequence
  Synthetic construct
cagctctcaatgttgaaacagaa

SEQ ID NO: 641 - DNA, 21 bp, Artificial Sequence
  Synthetic construct
acagccaagagcatctggtaa

SEQ ID NO: 642 - DNA, 22 bp, Artificial Sequence
  Synthetic construct
ggaagtttgctattggttcagc

SEQ ID NO: 643 - DNA, 22 bp, Artificial Sequence
  Synthetic construct
gcttctttcaggcgtttattcc

SEQ ID NO: 644 - DNA, 25 bp, Artificial Sequence
  Synthetic construct
gaaagtagccataaagatcatcagc

SEQ ID NO: 645 - DNA, 22 bp, Artificial Sequence
  Synthetic construct
cactttgtcaaacagctctccc

SEQ ID NO: 646 - DNA, 21 bp, Artificial Sequence
  Synthetic construct
cctgtggagaggtaaagctgg

SEQ ID NO: 647 - DNA, 20 bp, Artificial Sequence
  Synthetic construct
caggtagcttctttcaggcg

SEQ ID NO: 648 - DNA, 21 bp, Artificial Sequence
  Synthetic construct
catcagcaaaaggaagtttgc

SEQ ID NO: 649 - DNA, 20 bp, Artificial Sequence
  Synthetic construct
gcgtttattccccaccactt

SEQ ID NO: 650 - DNA, 20 bp, Artificial Sequence
  Synthetic construct
taaagctggctttcgagagg

SEQ ID NO: 651 - DNA, 20 bp, Artificial Sequence
  Synthetic construct
cccaccactttgtcaaacag

SEQ ID NO: 652 - DNA, 22 bp, Artificial Sequence
  Synthetic construct
gcaaaaggaagtttgctattgg

SEQ ID NO: 653 - DNA, 22 bp, Artificial Sequence
  Synthetic construct
ttattccccaccactttgtcaa

SEQ ID NO: 654 - DNA, 23 bp, Artificial Sequence
  Synthetic construct
ccataaagatcatcagcaaaagg

SEQ ID NO: 655 - DNA, 20 bp, Artificial Sequence
  Synthetic construct
aacagctctcccccttccat

SEQ ID NO: 656 - DNA, 22 bp, Artificial Sequence
  Synthetic construct
ctattggttcagcaagagaggc

SEQ ID NO: 657 - DNA, 26 bp, Artificial Sequence
  Synthetic construct
tggtaaaaatagagcttgcaggtagc

SEQ ID NO: 658 - DNA, 22 bp, Artificial Sequence
  Synthetic construct
gctggctttcgagaggaaaaca

SEQ ID NO: 659 - DNA, 27 bp, Artificial Sequence
  Synthetic construct
gcaggtagcttctttcaggcgtttatt

SEQ ID NO: 660 - DNA, 23 bp, Artificial Sequence
  Synthetic construct
tggagaggtaaagctggctttcg

SEQ ID NO: 661 - DNA, 24 bp, Artificial Sequence
  Synthetic construct
tttcaggcgtttattccccaccac

SEQ ID NO: 662 - DNA, 27 bp, Artificial Sequence
  Synthetic construct
tggctttcgagaggaaaacatgtaaga

SEQ ID NO: 663 - DNA, 24 bp, Artificial Sequence
  Synthetic construct
ttgtcaaacagctctcccccttcc

SEQ ID NO: 664 - DNA, 20 bp, Artificial Sequence
  Synthetic construct
tggtgcctgtggagaggtaa

SEQ ID NO: 665 - DNA, 21 bp, Artificial Sequence
  Synthetic construct
tctggctttaagtcacggtgt

SEQ ID NO: 666 - DNA, 27 bp, Artificial Sequence
  Synthetic construct
catgtaagaaagtagccataaagatca

SEQ ID NO: 667 - DNA, 24 bp, Artificial Sequence
  Synthetic construct
gacagtcctcttcttgagatgaca

SEQ ID NO: 668 - DNA, 27 bp, Artificial Sequence
  Synthetic construct
aagtttgctattggttcagcaagagag

SEQ ID NO: 669 - DNA, 25 bp, Artificial Sequence
  Synthetic construct
cacggtgtataataccgttttcatg

SEQ ID NO: 670 - DNA, 25 bp, Artificial Sequence
  Synthetic construct
gcactgtcactaagcagaaataaag

SEQ ID NO: 671 - DNA, 20 bp, Artificial Sequence
  Synthetic construct
cttggagtgcccaaaatcag

SEQ ID NO: 672 - DNA, 24 bp, Artificial Sequence
  Synthetic construct
tgatcagtcagtttatcctaaggc

SEQ ID NO: 673 - DNA, 23 bp, Artificial Sequence
  Synthetic construct
tgaaattgcactgtcactaagca

SEQ ID NO: 674 - DNA, 27 bp, Artificial Sequence
  Synthetic construct
aatcttggagtgcccaaaatcagtaat

SEQ ID NO: 675 - DNA, 20 bp, Artificial Sequence
  Synthetic construct
caagagggacatctcacggt

SEQ ID NO: 676 - DNA, 20 bp, Artificial Sequence
  Synthetic construct
agtgcacaggaaagccaaag

SEQ ID NO: 677 - DNA, 20 bp, Artificial Sequence
  Synthetic construct
gccatcaaagtttctgctgc

SEQ ID NO: 678 - DNA, 21 bp, Artificial Sequence
  Synthetic construct
aatccagtgatgattgatgcc

SEQ ID NO: 679 - DNA, 21 bp, Artificial Sequence
  Synthetic construct
ttggacacgtctgtgtagtgc

SEQ ID NO: 680 - DNA, 20 bp, Artificial Sequence
  Synthetic construct
agtttctgctgctcacaggg

SEQ ID NO: 681 - DNA, 20 bp, Artificial Sequence
  Synthetic construct
aagaggtgtcggatgacagg

SEQ ID NO: 682 - DNA, 21 bp, Artificial Sequence
  Synthetic construct
cgatacttctggggcaaccta

SEQ ID NO: 683 - DNA, 21 bp, Artificial Sequence
  Synthetic construct
tggctggaactattcacatgc

SEQ ID NO: 684 - DNA, 20 bp, Artificial Sequence
  Synthetic construct
tcacagggcccgatacttct

SEQ ID NO: 685 - DNA, 23 bp, Artificial Sequence
  Synthetic construct
catgcaaagtagtccttcagagg

SEQ ID NO: 686 - DNA, 24 bp, Artificial Sequence
  Synthetic construct
catcaaagtttctgctgctcacag

SEQ ID NO: 687 - DNA, 20 bp, Artificial Sequence
  Synthetic construct
tcaggaatcacacctcctgg

SEQ ID NO: 688 - DNA, 20 bp, Artificial Sequence
  Synthetic construct
aacctacccgggatgaacag

SEQ ID NO: 689 - DNA, 20 bp, Artificial Sequence
  Synthetic construct
tatgacccacacagctgagg

SEQ ID NO: 690 - DNA, 22 bp, Artificial Sequence
  Synthetic construct
gtgatgattgatgccatcaaag

SEQ ID NO: 691 - DNA, 22 bp, Artificial Sequence
  Synthetic construct
cgtctgtgtagtgcacaggaaa

SEQ ID NO: 692 - DNA, 23 bp, Artificial Sequence
  Synthetic construct
attgatgccatcaaagtttctgc

SEQ ID NO: 693 - DNA, 20 bp, Artificial Sequence
  Synthetic construct
aatcacacctcctgggtcct

SEQ ID NO: 694 - DNA, 20 bp, Artificial Sequence
  Synthetic construct
gctgctcacagggcccgata

SEQ ID NO: 695 - DNA, 27 bp, Artificial Sequence
  Synthetic construct
ggctggaactattcacatgcaaagtag

SEQ ID NO: 696 - DNA, 19 bp, Artificial Sequence
  Synthetic construct
tctggggcaacctacccgg

SEQ ID NO: 697 - DNA, 20 bp, Artificial Sequence
  Synthetic construct
ttcagaggggcgaagaggtg

SEQ ID NO: 698 - DNA, 20 bp, Artificial Sequence
  Synthetic construct
gggcccgatacttctggggc

SEQ ID NO: 699 - DNA, 21 bp, Artificial Sequence
  Synthetic construct
cctggggatgccttcaggaat

SEQ ID NO: 700 - DNA, 20 bp, Artificial Sequence
  Synthetic construct
caagagggacatctcacggt

SEQ ID NO: 701 - DNA, 18 bp, Artificial Sequence
  Synthetic construct
atgacaggcacgctccag

SEQ ID NO: 702 - DNA, 21 bp, Artificial Sequence
  Synthetic construct
ccgttcttctggatgtttgag

SEQ ID NO: 703 - DNA, 20 bp, Artificial Sequence
  Synthetic construct
ccatgttggacacgtctgtg

SEQ ID NO: 704 - DNA, 20 bp, Artificial Sequence
  Synthetic construct
tgaattactcacgccccaag

SEQ ID NO: 705 - DNA, 20 bp, Artificial Sequence
  Synthetic construct
aggaccttcccagcagcttc

SEQ ID NO: 706 - DNA, 21 bp, Artificial Sequence
  Synthetic construct
gttgtagccatgaaggttggc

SEQ ID NO: 707 - DNA, 19 bp, Artificial Sequence
  Synthetic construct
gggcgaagaggtgtcggat

SEQ ID NO: 708 - DNA, 23 bp, Artificial Sequence
  Synthetic construct
ggatgtttgagaatgttgtagcc

SEQ ID NO: 709 - DNA, 20 bp, Artificial Sequence
  Synthetic construct
tagtccttcagaggggcgaa

SEQ ID NO: 710 - DNA, 20 bp, Artificial Sequence
  Synthetic construct
acatctcacggttcctggag

SEQ ID NO: 711 - DNA, 26 bp, Artificial Sequence
  Synthetic construct
ctattcacatgcaaagtagtccttca

SEQ ID NO: 712 - DNA, 21 bp, Artificial Sequence
  Synthetic construct
cacctgctgaattactcacgc

SEQ ID NO: 713 - DNA, 18 bp, Artificial Sequence
  Synthetic construct
acggcccatgttggacac

SEQ ID NO: 714 - DNA, 20 bp, Artificial Sequence
  Synthetic construct
atgaaggttggcgacaagag

SEQ ID NO: 715 - DNA, 20 bp, Artificial Sequence
  Synthetic construct
gggcctggctggaactattc

SEQ ID NO: 716 - DNA, 23 bp, Artificial Sequence
  Synthetic construct
tgagaatgttgtagccatgaagg

SEQ ID NO: 717 - DNA, 18 bp, Artificial Sequence
  Synthetic construct
cacgctccaggaccttcc

SEQ ID NO: 718 - DNA, 27 bp, Artificial Sequence
  Synthetic construct
cgttcttctggatgtttgagaatgttg

SEQ ID NO: 719 - DNA, 19 bp, Artificial Sequence
  Synthetic construct
agcttctggcgggcaccac

SEQ ID NO: 720 - DNA, 21 bp, Artificial Sequence
  Synthetic construct
ggttggcgacaagagggacat

SEQ ID NO: 721 - DNA, 20 bp, Artificial Sequence
  Synthetic construct
gtcggatgacaggcacgctc

SEQ ID NO: 722 - DNA, 20 bp, Artificial Sequence
  Synthetic construct
gccccaaggagggtgatgac

SEQ ID NO: 723 - DNA, 27 bp, Artificial Sequence
  Synthetic construct
gtgtagtgcacaggaaagccaaagatc

SEQ ID NO: 724 - DNA, 24 bp, Artificial Sequence
  Synthetic construct
gtagccatgaaggttggcgacaag

SEQ ID NO: 725 - DNA, 20 bp, Artificial Sequence
  Synthetic construct
acaggcacgctccaggacct

SEQ ID NO: 726 - DNA, 24 bp, Artificial Sequence
  Synthetic construct
agagggacatctcacggttcctgg

SEQ ID NO: 727 - DNA, 20 bp, Artificial Sequence
  Synthetic construct
gctctgccacacaccccagt

SEQ ID NO: 728 - DNA, 20 bp, Artificial Sequence
  Synthetic construct
ggccggctcttcttcgaatt

SEQ ID NO: 729 - DNA, 18 bp, Artificial Sequence
  Synthetic construct
gcaccacggcccatgttg

SEQ ID NO: 730 - DNA, 19 bp, Artificial Sequence
  Synthetic construct
agggtgatgaccggccgtt

SEQ ID NO: 731 - DNA, 20 bp, Artificial Sequence
  Synthetic construct
gctccaggaccttcccagca

SEQ ID NO: 732 - DNA, 19 bp, Artificial Sequence
  Synthetic construct
accggccgttcttctggat

SEQ ID NO: 733 - DNA, 27 bp, Artificial Sequence
  Synthetic construct
aaagtagtccttcagaggggcgaagag

SEQ ID NO: 734 - DNA, 20 bp, Artificial Sequence
  Synthetic construct
tactcacgccccaaggaggg

SEQ ID NO: 735 - DNA, 20 bp, Artificial Sequence
  Synthetic construct
gtcctggctctgccacacac

SEQ ID NO: 736 - DNA, 22 bp, Artificial Sequence
  Synthetic construct
catcaaagtttctgctgctcac

SEQ ID NO: 737 - DNA, 20 bp, Artificial Sequence
  Synthetic construct
tcaggaatcacacctcctgg

SEQ ID NO: 738 - DNA, 22 bp, Artificial Sequence
  Synthetic construct
ttcttcgaattttaccacctgc

SEQ ID NO: 739 - DNA, 20 bp, Artificial Sequence
  Synthetic construct
agtgcacaggaaagccaaag

SEQ ID NO: 740 - DNA, 24 bp, Artificial Sequence
  Synthetic construct
ttttaccacctgctgaattactca

SEQ ID NO: 741 - DNA, 18 bp, Artificial Sequence
  Synthetic construct
tcctgggtcctggctctg

SEQ ID NO: 742 - DNA, 24 bp, Artificial Sequence
  Synthetic construct
cggctcttcttcgaattttaccac

SEQ ID NO: 743 - DNA, 18 bp, Artificial Sequence
  Synthetic construct
acaccccagtgggcttgg

SEQ ID NO: 744 - DNA, 27 bp, Artificial Sequence
  Synthetic construct
cttcgaattttaccacctgctgaatta

SEQ ID NO: 745 - DNA, 18 bp, Artificial Sequence
  Synthetic construct
cagtgggcttggggcctg

SEQ ID NO: 746 - DNA, 27 bp, Artificial Sequence
  Synthetic construct
tacaggccggctcttcttcgaatttta

SEQ ID NO: 747 - DNA, 18 bp, Artificial Sequence
  Synthetic construct
gcttggggcctggctgga

SEQ ID NO: 748 - DNA, 19 bp, Artificial Sequence
  Synthetic construct
tttctgctgctcacagggc

SEQ ID NO: 749 - DNA, 20 bp, Artificial Sequence
  Synthetic construct
aagaggtgtcggatgacagg

SEQ ID NO: 750 - DNA, 27 bp, Artificial Sequence
  Synthetic construct
cttcgaattttaccacctgctgaatta

SEQ ID NO: 751 - DNA, 18 bp, Artificial Sequence
  Synthetic construct
gcttggggcctggctgga

SEQ ID NO: 752 - DNA, 21 bp, Artificial Sequence
  Synthetic construct
aatccagtgatgattgatgcc

SEQ ID NO: 753 - DNA, 21 bp, Artificial Sequence
  Synthetic construct
gtttgatcgagttcgacttgg

SEQ ID NO: 754 - DNA, 20 bp, Artificial Sequence
  Synthetic construct
agtttctgctgctcacaggg

SEQ ID NO: 755 - DNA, 22 bp, Artificial Sequence
  Synthetic construct
cttctttgccattcatgacaac

SEQ ID NO: 756 - DNA, 20 bp, Artificial Sequence
  Synthetic construct
gccatcaaagtttctgctgc

SEQ ID NO: 757 - DNA, 22 bp, Artificial Sequence
  Synthetic construct
accacaaaacatcttctttgcc

SEQ ID NO: 758 - DNA, 20 bp, Artificial Sequence
  Synthetic construct
tcacagggcccgatacttct

SEQ ID NO: 759 - DNA, 21 bp, Artificial Sequence
  Synthetic construct
ccattcatgacaacagggaaa

SEQ ID NO: 760 - DNA, 20 bp, Artificial Sequence
  Synthetic construct
aacctacccgggatgaacag

SEQ ID NO: 761 - DNA, 20 bp, Artificial Sequence
  Synthetic construct
tttcgagctcagtgcaccac

SEQ ID NO: 762 - DNA, 21 bp, Artificial Sequence
  Synthetic construct
cgatacttctggggcaaccta

SEQ ID NO: 763 - DNA, 23 bp, Artificial Sequence
  Synthetic construct
aaacatcttctttgccattcatg

SEQ ID NO: 764 - DNA, 22 bp, Artificial Sequence
  Synthetic construct
gtgatgattgatgccatcaaag

SEQ ID NO: 765 - DNA, 21 bp, Artificial Sequence
  Synthetic construct
tggtttttcccctgtttgatc

SEQ ID NO: 766 - DNA, 24 bp, Artificial Sequence
  Synthetic construct
catcaaagtttctgctgctcacag

SEQ ID NO: 767 - DNA, 22 bp, Artificial Sequence
  Synthetic construct
catgacaacagggaaaagttgg

SEQ ID NO: 768 - DNA, 23 bp, Artificial Sequence
  Synthetic construct
attgatgccatcaaagtttctgc

SEQ ID NO: 769 - DNA, 22 bp, Artificial Sequence
  Synthetic construct
ctcagtgcaccacaaaacatct

SEQ ID NO: 770 - DNA, 20 bp, Artificial Sequence
  Synthetic construct
gctgctcacagggcccgata

SEQ ID NO: 771 - DNA, 26 bp, Artificial Sequence
  Synthetic construct
gacaacagggaaaagttggtttttcc

SEQ ID NO: 772 - DNA, 20 bp, Artificial Sequence
  Synthetic construct
gggcccgatacttctggggc

SEQ ID NO: 773 - DNA, 27 bp, Artificial Sequence
  Synthetic construct
agggaaaagttggtttttcccctgttt

SEQ ID NO: 774 - DNA, 21 bp, Artificial Sequence
  Synthetic construct
ccgttcttctggatgtttgag

SEQ ID NO: 775 - DNA, 22 bp, Artificial Sequence
  Synthetic construct
tcgacttggtggttattgtctg

SEQ ID NO: 776 - DNA, 21 bp, Artificial Sequence
  Synthetic construct
gttgtagccatgaaggttggc

SEQ ID NO: 777 - DNA, 20 bp, Artificial Sequence
  Synthetic construct
tcccctgtttgatcgagttc

SEQ ID NO: 778 - DNA, 23 bp, Artificial Sequence
  Synthetic construct
ggatgtttgagaatgttgtagcc

SEQ ID NO: 779 - DNA, 20 bp, Artificial Sequence
  Synthetic construct
tcgagttcgacttggtggtt

SEQ ID NO: 780 - DNA, 21 bp, Artificial Sequence
  Synthetic construct
cacctgctgaattactcacgc

SEQ ID NO: 781 - DNA, 27 bp, Artificial Sequence
  Synthetic construct
gacttggtggttattgtctgtactttc

SEQ ID NO: 782 - DNA, 20 bp, Artificial Sequence
  Synthetic construct
ggccggctcttcttcgaatt

SEQ ID NO: 783 - DNA, 27 bp, Artificial Sequence
  Synthetic construct
atcgagttcgacttggtggttattgtc

SEQ ID NO: 784 - DNA, 24 bp, Artificial Sequence
  Synthetic construct
gtagccatgaaggttggcgacaag

SEQ ID NO: 785 - DNA, 27 bp, Artificial Sequence
  Synthetic construct
tttcccctgtttgatcgagttcgactt

SEQ ID NO: 786 - DNA, 20 bp, Artificial Sequence
  Synthetic construct
acatctcacggttcctggag

SEQ ID NO: 787 - DNA, 20 bp, Artificial Sequence
  Synthetic construct
aagaggtgtcggatgacagg

SEQ ID NO: 788 - DNA, 19 bp, Artificial Sequence
  Synthetic construct
accggccgttcttctggat

SEQ ID NO: 789 - DNA, 20 bp, Artificial Sequence
  Synthetic construct
ccatgttggacacgtctgtg

SEQ ID NO: 790 - DNA, 24 bp, Artificial Sequence
  Synthetic construct
agagggacatctcacggttcctgg

SEQ ID NO: 791 - DNA, 18 bp, Artificial Sequence
  Synthetic construct
gcaccacggcccatgttg

SEQ ID NO: 792 - DNA, 24 bp, Artificial Sequence
  Synthetic construct
ttttaccacctgctgaattactca

SEQ ID NO: 793 - DNA, 21 bp, Artificial Sequence
  Synthetic construct
ttggacacgtctgtgtagtgc

SEQ ID NO: 794 - DNA, 24 bp, Artificial Sequence
  Synthetic construct
cggctcttcttcgaattttaccac

SEQ ID NO: 795 - DNA, 18 bp, Artificial Sequence
  Synthetic construct
acggcccatgttggacac

SEQ ID NO: 796 - DNA, 20 bp, Artificial Sequence
  Synthetic construct
tactcacgccccaaggaggg

SEQ ID NO: 797 - DNA, 24 bp, Artificial Sequence
  Synthetic construct
gacacgtctgtgtagtgcacagga

SEQ ID NO: 798 - DNA, 27 bp, Artificial Sequence
  Synthetic construct
cttcgaattttaccacctgctgaatta

SEQ ID NO: 799 - DNA, 20 bp, Artificial Sequence
  Synthetic construct
acaggcacgctccaggacct

SEQ ID NO: 800 - DNA, 22 bp, Artificial Sequence
  Synthetic construct
gttgtagccatgaaggttggcg

SEQ ID NO: 801 - DNA, 20 bp, Artificial Sequence
  Synthetic construct
acaggcacgctccaggacct

SEQ ID NO: 802 - DNA, 20 bp, Artificial Sequence
  Synthetic construct
tactcacgccccaaggaggg

SEQ ID NO: 803 - DNA, 19 bp, Artificial Sequence
  Synthetic construct
gggcgaagaggtgtcggat

SEQ ID NO: 804 - DNA, 22 bp, Artificial Sequence
  Synthetic construct
ccgtgatagcatcaaagaatga

SEQ ID NO: 805 - DNA, 21 bp, Artificial Sequence
  Synthetic construct
tggctggaactattcacatgc

SEQ ID NO: 806 - DNA, 22 bp, Artificial Sequence
  Synthetic construct
ataaactcgagctgcaggactg

SEQ ID NO: 807 - DNA, 20 bp, Artificial Sequence
  Synthetic construct
aagaggtgtcggatgacagg

SEQ ID NO: 808 - DNA, 23 bp, Artificial Sequence
  Synthetic construct
ggactgcttggaatacaatagga

SEQ ID NO: 809 - DNA, 20 bp, Artificial Sequence
  Synthetic construct
tcaggaatcacacctcctgg

SEQ ID NO: 810 - DNA, 24 bp, Artificial Sequence
  Synthetic construct
catcaaagaatgataaactcgagc

SEQ ID NO: 811 - DNA, 23 bp, Artificial Sequence
  Synthetic construct
catgcaaagtagtccttcagagg

SEQ ID NO: 812 - DNA, 25 bp, Artificial Sequence
  Synthetic construct
cttggaatacaataggatagccaag

SEQ ID NO: 813 - DNA, 20 bp, Artificial Sequence
  Synthetic construct
tatgacccacacagctgagg

SEQ ID NO: 814 - DNA, 22 bp, Artificial Sequence
  Synthetic construct
agctgcaggactgcttggaata

SEQ ID NO: 815 - DNA, 20 bp, Artificial Sequence
  Synthetic construct
ttcagaggggcgaagaggtg

SEQ ID NO: 816 - DNA, 27 bp, Artificial Sequence
  Synthetic construct
gtgatagcatcaaagaatgataaactc

SEQ ID NO: 817 - DNA, 20 bp, Artificial Sequence
  Synthetic construct
aatcacacctcctgggtcct

SEQ ID NO: 818 - DNA, 24 bp, Artificial Sequence
  Synthetic construct
agaatgataaactcgagctgcagg

SEQ ID NO: 819 - DNA, 18 bp, Artificial Sequence
  Synthetic construct
tcctgggtcctggctctg

SEQ ID NO: 820 - DNA, 20 bp, Artificial Sequence
  Synthetic construct
agtttctgctgctcacaggg

SEQ ID NO: 821 - DNA, 26 bp, Artificial Sequence
  Synthetic construct
ctattcacatgcaaagtagtccttca

SEQ ID NO: 822 - DNA, 20 bp, Artificial Sequence
  Synthetic construct
aacctacccgggatgaacag

SEQ ID NO: 823 - DNA, 20 bp, Artificial Sequence
  Synthetic construct
ccatgttggacacgtctgtg

SEQ ID NO: 824 - DNA, 21 bp, Artificial Sequence
  Synthetic construct
cgatacttctggggcaaccta

SEQ ID NO: 825 - DNA, 20 bp, Artificial Sequence
  Synthetic construct
gggcctggctggaactattc

SEQ ID NO: 826 - DNA, 24 bp, Artificial Sequence
  Synthetic construct
catcaaagtttctgctgctcacag

SEQ ID NO: 827 - DNA, 18 bp, Artificial Sequence
  Synthetic construct
acggcccatgttggacac

SEQ ID NO: 828 - DNA, 20 bp, Artificial Sequence
  Synthetic construct
tcacagggcccgatacttct

SEQ ID NO: 829 - DNA, 20 bp, Artificial Sequence
  Synthetic construct
aggaccttcccagcagcttc

SEQ ID NO: 830 - DNA, 23 bp, Artificial Sequence
  Synthetic construct
attgatgccatcaaagtttctgc

SEQ ID NO: 831 - DNA, 18 bp, Artificial Sequence
  Synthetic construct
atgacaggcacgctccag

SEQ ID NO: 832 - DNA, 19 bp, Artificial Sequence
  Synthetic construct
tctggggcaacctacccgg

SEQ ID NO: 833 - DNA, 19 bp, Artificial Sequence
  Synthetic construct
gggcgaagaggtgtcggat

SEQ ID NO: 834 - DNA, 22 bp, Artificial Sequence
  Synthetic construct
gcgacaagagggacatctcacg

SEQ ID NO: 835 - DNA, 19 bp, Artificial Sequence
  Synthetic construct
agcttctggcgggcaccac

SEQ ID NO: 836 - DNA, 20 bp, Artificial Sequence
  Synthetic construct
acatctcacggttcctggag

SEQ ID NO: 837 - DNA, 18 bp, Artificial Sequence
  Synthetic construct
ctggctctgccacacacc

SEQ ID NO: 838 - DNA, 24 bp, Artificial Sequence
  Synthetic construct
caagagggacatctcacggttcct

SEQ ID NO: 839 - DNA, 27 bp, Artificial Sequence
  Synthetic construct
aaagtagtccttcagaggggcgaagag

SEQ ID NO: 840 - DNA, 20 bp, Artificial Sequence
  Synthetic construct
atgaaggttggcgacaagag

SEQ ID NO: 841 - DNA, 18 bp, Artificial Sequence
  Synthetic construct
acacaccccagtgggctt

SEQ ID NO: 842 - DNA, 22 bp, Artificial Sequence
  Synthetic construct
aacctgaagctgatgctctttc

SEQ ID NO: 843 - DNA, 20 bp, Artificial Sequence
  Synthetic construct
tatcctcatttcctgtgcgg

SEQ ID NO: 844 - DNA, 23 bp, Artificial Sequence
  Synthetic construct
ttaccaagactggttacacctgg

SEQ ID NO: 845 - DNA, 22 bp, Artificial Sequence
  Synthetic construct
aacctgaagctgatgctctttc

SEQ ID NO: 846 - DNA, 25 bp, Artificial Sequence
  Synthetic construct
ctgcaatctggaaataatatcctca

SEQ ID NO: 847 - DNA, 20 bp, Artificial Sequence
  Synthetic construct
ctggagctggaaattcaacc

SEQ ID NO: 848 - DNA, 25 bp, Artificial Sequence
  Synthetic construct
gaaataatatcctcatttcctgtgc

SEQ ID NO: 849 - DNA, 24 bp, Artificial Sequence
  Synthetic construct
aagactggttacacctggagctgg

SEQ ID NO: 850 - DNA, 19 bp, Artificial Sequence
  Synthetic construct
catttcctgtgcggccacc

SEQ ID NO: 851 - DNA, 23 bp, Artificial Sequence
  Synthetic construct
gttacacctggagctggaaattc

SEQ ID NO: 852 - DNA, 20 bp, Artificial Sequence
  Synthetic construct
gccaccaaagaccaaatcag

SEQ ID NO: 853 - DNA, 27 bp, Artificial Sequence
  Synthetic construct
acctggagctggaaattcaacctgaag

SEQ ID NO: 854 - DNA, 21 bp, Artificial Sequence
  Synthetic construct
tcctgtgcggccaccaaagac

SEQ ID NO: 855 - DNA, 20 bp, Artificial Sequence
  Synthetic construct
acccttgcaccttccttctg

SEQ ID NO: 856 - DNA, 24 bp, Artificial Sequence
  Synthetic construct
tctgagtggtcataactccttgag

SEQ ID NO: 857 - DNA, 22 bp, Artificial Sequence
  Synthetic construct
cgagaggtgttgaaagaggaag

SEQ ID NO: 858 - DNA, 23 bp, Artificial Sequence
  Synthetic construct
ccaaatcagaattttctgagtgg

SEQ ID NO: 859 - DNA, 22 bp, Artificial Sequence
  Synthetic construct
ctctttctgaggaggacgtagc

SEQ ID NO: 860 - DNA, 26 bp, Artificial Sequence
  Synthetic construct
agaattttctgagtggtcataactcc

SEQ ID NO: 861 - DNA, 24 bp, Artificial Sequence
  Synthetic construct
tgatgctctttcagatactgaacg

SEQ ID NO: 862 - DNA, 22 bp, Artificial Sequence
  Synthetic construct
gagaggcactatgaggtcttgc

SEQ ID NO: 863 - DNA, 24 bp, Artificial Sequence
  Synthetic construct
tgaagctgatgctctttcagatac

SEQ ID NO: 864 - DNA, 20 bp, Artificial Sequence
  Synthetic construct
caaagaggaagtgctcctgg

SEQ ID NO: 865 - DNA, 21 bp, Artificial Sequence
  Synthetic construct
gacacacagaaccttccgaga

SEQ ID NO: 866 - DNA, 21 bp, Artificial Sequence
  Synthetic construct
agctccaggtcagctaccatc

SEQ ID NO: 867 - DNA, 21 bp, Artificial Sequence
  Synthetic construct
ccctctctctctggacacaca

SEQ ID NO: 868 - DNA, 21 bp, Artificial Sequence
  Synthetic construct
tatgaggtcttgctgcagctc

SEQ ID NO: 869 - DNA, 24 bp, Artificial Sequence
  Synthetic construct
aggtgttgaaagaggaagatgttc

SEQ ID NO: 870 - DNA, 23 bp, Artificial Sequence
  Synthetic construct
aaatctcaaagaggaagtgctcc

SEQ ID NO: 871 - DNA, 21 bp, Artificial Sequence
  Synthetic construct
agaaccttccgagaggtgttg

SEQ ID NO: 872 - DNA, 20 bp, Artificial Sequence
  Synthetic construct
gtgtggccgagaggcactat

SEQ ID NO: 873 - DNA, 23 bp, Artificial Sequence
  Synthetic construct
ctctctggacacacagaaccttc

SEQ ID NO: 874 - DNA, 20 bp, Artificial Sequence
  Synthetic construct
gtcttgctgcagctccaggt

SEQ ID NO: 875 - DNA, 24 bp, Artificial Sequence
  Synthetic construct
accttccgagaggtgttgaaagag

SEQ ID NO: 876 - DNA, 18 bp, Artificial Sequence
  Synthetic construct
aaggggtgtggccgagag

SEQ ID NO: 877 - DNA, 19 bp, Artificial Sequence
  Synthetic construct
cagactggcagagagctgc

SEQ ID NO: 878 - DNA, 18 bp, Artificial Sequence
  Synthetic construct
ctcctgggaaggggtgtg

SEQ ID NO: 879 - DNA, 20 bp, Artificial Sequence
  Synthetic construct
gagctgccctctctctctgg

SEQ ID NO: 880 - DNA, 18 bp, Artificial Sequence
  Synthetic construct
aagtgctcctgggaaggg

SEQ ID NO: 881 - DNA, 22 bp, Artificial Sequence
  Synthetic construct
actggcagagagctgccctctc

SEQ ID NO: 882 - DNA, 24 bp, Artificial Sequence
  Synthetic construct
gtggccgagaggcactatgaggtc

SEQ ID NO: 883 - DNA, 21 bp, Artificial Sequence
  Synthetic construct
cttctgcagactggcagagag

SEQ ID NO: 884 - DNA, 20 bp, Artificial Sequence
  Synthetic construct
tgcggaaaatctcaaagagg

SEQ ID NO: 885 - DNA, 19 bp, Artificial Sequence
  Synthetic construct
tggagacccttgcaccttc

SEQ ID NO: 886 - DNA, 20 bp, Artificial Sequence
  Synthetic construct
ccgtctgcggaaaatctcaa

SEQ ID NO: 887 - DNA, 20 bp, Artificial Sequence
  Synthetic construct
tttcctggagacccttgcac

SEQ ID NO: 888 - DNA, 19 bp, Artificial Sequence
  Synthetic construct
ctggagccgtctgcggaaa

SEQ ID NO: 889 - DNA, 20 bp, Artificial Sequence
  Synthetic construct
ctgtgtttctccggacttcg

SEQ ID NO: 890 - DNA, 22 bp, Artificial Sequence
  Synthetic construct
atggtactgaagcaggtatccg

SEQ ID NO: 891 - DNA, 22 bp, Artificial Sequence
  Synthetic construct
ccgtgtatgagggattcatctc

SEQ ID NO: 892 - DNA, 22 bp, Artificial Sequence
  Synthetic construct
tttgccttcaacttgagagtga

SEQ ID NO: 893 - DNA, 21 bp, Artificial Sequence
  Synthetic construct
ggtcgaaaaccgtgtatgagg

SEQ ID NO: 894 - DNA, 26 bp, Artificial Sequence
  Synthetic construct
caacttgagagtgattaaatgctctc

SEQ ID NO: 895 - DNA, 22 bp, Artificial Sequence
  Synthetic construct
agagcttttctgtgtttctccg

SEQ ID NO: 896 - DNA, 24 bp, Artificial Sequence
  Synthetic construct
ttaacttgatggtactgaagcagg

SEQ ID NO: 897 - DNA, 18 bp, Artificial Sequence
  Synthetic construct
atgtgcaggacccagcag

SEQ ID NO: 898 - DNA, 23 bp, Artificial Sequence
  Synthetic construct
tgctctctaccagaagcatcttc

SEQ ID NO: 899 - DNA, 21 bp, Artificial Sequence
  Synthetic construct
acccagcaggtctagagcttt

SEQ ID NO: 900 - DNA, 21 bp, Artificial Sequence
  Synthetic construct
gcaggtatccgcatacacaag

SEQ ID NO: 901 - DNA, 20 bp, Artificial Sequence
  Synthetic construct
gtgacggaagcgagcctgtt

SEQ ID NO: 902 - DNA, 25 bp, Artificial Sequence
  Synthetic construct
gcatcttctgcttttaacttgatgg

SEQ ID NO: 903 - DNA, 19 bp, Artificial Sequence
  Synthetic construct
cctgcttctgccccagaac

SEQ ID NO: 904 - DNA, 27 bp, Artificial Sequence
  Synthetic construct
gagagtgattaaatgctctctaccaga

SEQ ID NO: 905 - DNA, 18 bp, Artificial Sequence
  Synthetic construct
gagcctgttgcgccagtg

SEQ ID NO: 906 - DNA, 27 bp, Artificial Sequence
  Synthetic construct
ttctgcttttaacttgatggtactgaa

SEQ ID NO: 907 - DNA, 24 bp, Artificial Sequence
  Synthetic construct
gcaggtctagagcttttctgtgtt

SEQ ID NO: 908 - DNA, 23 bp, Artificial Sequence
  Synthetic construct
ctaccagaagcatcttctgcttt

SEQ ID NO: 909 - DNA, 18 bp, Artificial Sequence
  Synthetic construct
ccggacttcgagccatgg

SEQ ID NO: 910 - DNA, 23 bp, Artificial Sequence
  Synthetic construct
actgaagcaggtatccgcataca

SEQ ID NO: 911 - DNA, 20 bp, Artificial Sequence
  Synthetic construct
agggattcatctcggctcag

SEQ ID NO: 912 - DNA, 20 bp, Artificial Sequence
  Synthetic construct
gaggcacaaaatggaacagg

SEQ ID NO: 913 - DNA, 19 bp, Artificial Sequence
  Synthetic construct
agaaccggtcgaaaaccgt

SEQ ID NO: 914 - DNA, 23 bp, Artificial Sequence
  Synthetic construct
aaataatctggtgattctgcagg

SEQ ID NO: 915 - DNA, 20 bp, Artificial Sequence
  Synthetic construct
gcaggacccagcaggtctag

SEQ ID NO: 916 - DNA, 21 bp, Artificial Sequence
  Synthetic construct
tggaacaggaaaatccacaaa

SEQ ID NO: 917 - DNA, 18 bp, Artificial Sequence
  Synthetic construct
catggcggtgacggaagc

SEQ ID NO: 918 - DNA, 20 bp, Artificial Sequence
  Synthetic construct
gaggtgtccaggaggcacaa

SEQ ID NO: 919 - DNA, 24 bp, Artificial Sequence
  Synthetic construct
cgaaaaccgtgtatgagggattca

SEQ ID NO: 920 - DNA, 24 bp, Artificial Sequence
  Synthetic construct
ggcacaaaatggaacaggaaaatc

SEQ ID NO: 921 - DNA, 27 bp, Artificial Sequence
  Synthetic construct
gtgtatgagggattcatctcggctcag

SEQ ID NO: 922 - DNA, 22 bp, Artificial Sequence
  Synthetic construct
tgtccaggaggcacaaaatgga

SEQ ID NO: 923 - DNA, 18 bp, Artificial Sequence
  Synthetic construct
cagtgccccctgcttctg

SEQ ID NO: 924 - DNA, 25 bp, Artificial Sequence
  Synthetic construct
caggaaaatccacaaaataatctgg

SEQ ID NO: 925 - DNA, 18 bp, Artificial Sequence
  Synthetic construct
tctgccccagaaccggtc

SEQ ID NO: 926 - DNA, 26 bp, Artificial Sequence
  Synthetic construct
atccacaaaataatctggtgattctg

SEQ ID NO: 927 - DNA, 20 bp, Artificial Sequence
  Synthetic construct
tttctccggacttcgagcca

SEQ ID NO: 928 - DNA, 25 bp, Artificial Sequence
  Synthetic construct
gctgccaaaaactgactataaatgc

SEQ ID NO: 929 - DNA, 20 bp, Artificial Sequence
  Synthetic construct
gccccagaaccggtcgaaaa

SEQ ID NO: 930 - DNA, 20 bp, Artificial Sequence
  Synthetic construct
gcgtgctgttgcactccgtg

SEQ ID NO: 931 - DNA, 19 bp, Artificial Sequence
  Synthetic construct
gaagcgagcctgttgcgcc

SEQ ID NO: 932 - DNA, 22 bp, Artificial Sequence
  Synthetic construct
ctgttgcactccgtggaggttt

SEQ ID NO: 933 - DNA, 18 bp, Artificial Sequence
  Synthetic construct
gttgcgccagtgccccct

SEQ ID NO: 934 - DNA, 23 bp, Artificial Sequence
  Synthetic construct
gcactccgtggaggtttttctgg

SEQ ID NO: 935 - DNA, 20 bp, Artificial Sequence
  Synthetic construct
cttcgagccatggcggtgac

SEQ ID NO: 936 - DNA, 23 bp, Artificial Sequence
  Synthetic construct
cgtggaggtttttctggctcaag

SEQ ID NO: 937 - DNA, 18 bp, Artificial Sequence
  Synthetic construct
cagcggactgcgcatgtg

SEQ ID NO: 938 - DNA, 25 bp, Artificial Sequence
  Synthetic construct
atgcctttagtgattctattgctgc

SEQ ID NO: 939 - DNA, 18 bp, Artificial Sequence
  Synthetic construct
tctgccccagaaccggtc

SEQ ID NO: 940 - DNA, 25 bp, Artificial Sequence
  Synthetic construct
caggaaaatccacaaaataatctgg

SEQ ID NO: 941 - DNA, 18 bp, Artificial Sequence
  Synthetic construct
cagtgccccctgcttctg

SEQ ID NO: 942 - DNA, 26 bp, Artificial Sequence
  Synthetic construct
atccacaaaataatctggtgattctg

SEQ ID NO: 943 - DNA, 20 bp, Artificial Sequence
  Synthetic construct
ctgtgtttctccggacttcg

SEQ ID NO: 944 - DNA, 25 bp, Artificial Sequence
  Synthetic construct
cagctcttgtctattctttaaggca

SEQ ID NO: 945 - DNA, 20 bp, Artificial Sequence
  Synthetic construct
agggattcatctcggctcag

SEQ ID NO: 946 - DNA, 22 bp, Artificial Sequence
  Synthetic construct
atggtactgaagcaggtatccg

SEQ ID NO: 947 - DNA, 19 bp, Artificial Sequence
  Synthetic construct
agaaccggtcgaaaaccgt

SEQ ID NO: 948 - DNA, 25 bp, Artificial Sequence
  Synthetic construct
gcatcttctgcttttaacttgatgg

SEQ ID NO: 949 - DNA, 24 bp, Artificial Sequence
  Synthetic construct
cgaaaaccgtgtatgagggattca

SEQ ID NO: 950 - DNA, 20 bp, Artificial Sequence
  Synthetic construct
gaggtgtccaggaggcacaa

SEQ ID NO: 951 - DNA, 20 bp, Artificial Sequence
  Synthetic construct
gccccagaaccggtcgaaaa

SEQ ID NO: 952 - DNA, 22 bp, Artificial Sequence
  Synthetic construct
ggaggcacaaaatggaacagga

SEQ ID NO: 953 - DNA, 20 bp, Artificial Sequence
  Synthetic construct
gtgacggaagcgagcctgtt

SEQ ID NO: 954 - DNA, 27 bp, Artificial Sequence
  Synthetic construct
aaaataatctggtgattctgcaggata

SEQ ID NO: 955 - DNA, 18 bp, Artificial Sequence
  Synthetic construct
catggcggtgacggaagc

SEQ ID NO: 956 - DNA, 24 bp, Artificial Sequence
  Synthetic construct
gcacaaaatggaacaggaaaatcc

SEQ ID NO: 957 - DNA, 18 bp, Artificial Sequence
  Synthetic construct
catggcggtgacggaagc

SEQ ID NO: 958 - DNA, 22 bp, Artificial Sequence
  Synthetic construct
ggggaggaggaggtagtgcata

SEQ ID NO: 959 - DNA, 20 bp, Artificial Sequence
  Synthetic construct
tttctccggacttcgagcca

SEQ ID NO: 960 - DNA, 24 bp, Artificial Sequence
  Synthetic construct
aatggaacaggaaaatccacaaaa

SEQ ID NO: 961 - DNA, 20 bp, Artificial Sequence
  Synthetic construct
gcaggacccagcaggtctag

SEQ ID NO: 962 - DNA, 24 bp, Artificial Sequence
  Synthetic construct
caataaggcttgagtagaactggg

SEQ ID NO: 963 - DNA, 19 bp, Artificial Sequence
  Synthetic construct
gaagcgagcctgttgcgcc

SEQ ID NO: 964 - DNA, 27 bp, Artificial Sequence
  Synthetic construct
ggaggaggaggtagtgcatacagctct

SEQ ID NO: 965 - DNA, 18 bp, Artificial Sequence
  Synthetic construct
cagcggactgcgcatgtg

SEQ ID NO: 966 - DNA, 24 bp, Artificial Sequence
  Synthetic construct
ggcttgagtagaactggggaggag

SEQ ID NO: 967 - DNA, 20 bp, Artificial Sequence
  Synthetic construct
gtgacggaagcgagcctgtt

SEQ ID NO: 968 - DNA, 27 bp, Artificial Sequence
  Synthetic construct
ggaggaggaggtagtgcatacagctct

SEQ ID NO: 969 - DNA, 21 bp, Artificial Sequence
  Synthetic construct
ggtcgaaaaccgtgtatgagg

SEQ ID NO: 970 - DNA, 23 bp, Artificial Sequence
  Synthetic construct
tcccaaccaagagttcctatctc

SEQ ID NO: 971 - DNA, 22 bp, Artificial Sequence
  Synthetic construct
agagcttttctgtgtttctccg

SEQ ID NO: 972 - DNA, 26 bp, Artificial Sequence
  Synthetic construct
agttcctatctcttcaataaggcttg

SEQ ID NO: 973 - DNA, 22 bp, Artificial Sequence
  Synthetic construct
ccgtgtatgagggattcatctc

SEQ ID NO: 974 - DNA, 27 bp, Artificial Sequence
  Synthetic construct
caaccaagagttcctatctcttcaata

SEQ ID NO: 975 - DNA, 19 bp, Artificial Sequence
  Synthetic construct
agaaccggtcgaaaaccgt

SEQ ID NO: 976 - DNA, 27 bp, Artificial Sequence
  Synthetic construct
atctcttcaataaggcttgagtagaac

SEQ ID NO: 977 - DNA, 21 bp, Artificial Sequence
  Synthetic construct
acccagcaggtctagagcttt

SEQ ID NO: 978 - DNA, 27 bp, Artificial Sequence
  Synthetic construct
ggtagtgcatacagctcttgtctattc

SEQ ID NO: 979 - DNA, 24 bp, Artificial Sequence
  Synthetic construct
gcaggtctagagcttttctgtgtt

SEQ ID NO: 980 - DNA, 21 bp, Artificial Sequence
  Synthetic construct
gcaggtatccgcatacacaag

SEQ ID NO: 981 - DNA, 18 bp, Artificial Sequence
  Synthetic construct
cagtgccccctgcttctg

SEQ ID NO: 982 - DNA, 22 bp, Artificial Sequence
  Synthetic construct
tttgccttcaacttgagagtga

SEQ ID NO: 983 - DNA, 20 bp, Artificial Sequence
  Synthetic construct
tttctccggacttcgagcca

SEQ ID NO: 984 - DNA, 23 bp, Artificial Sequence
  Synthetic construct
actgaagcaggtatccgcataca

SEQ ID NO: 985 - DNA, 18 bp, Artificial Sequence
  Synthetic construct
tctgccccagaaccggtc

SEQ ID NO: 986 - DNA, 27 bp, Artificial Sequence
  Synthetic construct
agtgattaaatgctctctaccagaagc

SEQ ID NO: 987 - DNA, 24 bp, Artificial Sequence
  Synthetic construct
cgaaaaccgtgtatgagggattca

SEQ ID NO: 988 - DNA, 27 bp, Artificial Sequence
  Synthetic construct
aaatgctctctaccagaagcatcttct

SEQ ID NO: 989 - DNA, 19 bp, Artificial Sequence
  Synthetic construct
catgtgcaggacccagcag

SEQ ID NO: 990 - DNA, 27 bp, Artificial Sequence
  Synthetic construct
tttaacttgatggtactgaagcaggta

SEQ ID NO: 991 - DNA, 18 bp, Artificial Sequence
  Synthetic construct
tcgagccatggcggtgac

SEQ ID NO: 992 - DNA, 27 bp, Artificial Sequence
  Synthetic construct
tgccttcaacttgagagtgattaaatg

SEQ ID NO: 993 - DNA, 20 bp, Artificial Sequence
  Synthetic construct
gccccagaaccggtcgaaaa

SEQ ID NO: 994 - DNA, 20 bp, Artificial Sequence
  Synthetic construct
gaggtgtccaggaggcacaa

SEQ ID NO: 995 - DNA, 19 bp, Artificial Sequence
  Synthetic construct
gaagcgagcctgttgcgcc

SEQ ID NO: 996 - DNA, 22 bp, Artificial Sequence
  Synthetic construct
ggaggcacaaaatggaacagga

SEQ ID NO: 997 - DNA, 26 bp, Artificial Sequence
  Synthetic construct
agttgccttaaagaatagacaagagc

SEQ ID NO: 998 - DNA, 22 bp, Artificial Sequence
  Synthetic construct
tttgccttcaacttgagagtga

SEQ ID NO: 999 - DNA, 21 bp, Artificial Sequence
  Synthetic construct
tgtatgagggattcatctcgg

SEQ ID NO: 1000 - DNA, 23 bp, Artificial Sequence
  Synthetic construct
aaataatctggtgattctgcagg

SEQ ID NO: 1001 - DNA, 20 bp, Artificial Sequence
  Synthetic construct
gtgacggaagcgagcctgtt

SEQ ID NO: 1002 - DNA, 26 bp, Artificial Sequence
  Synthetic construct
atccacaaaataatctggtgattctg

SEQ ID NO: 1003 - DNA, 20 bp, Artificial Sequence
  Synthetic construct
ctgtgtttctccggacttcg

SEQ ID NO: 1004 - DNA, 20 bp, Artificial Sequence
  Synthetic construct
gaggcacaaaatggaacagg

SEQ ID NO: 1005 - DNA, 26 bp, Artificial Sequence
  Synthetic construct
gtggataccatcgaatagtacaacag

SEQ ID NO: 1006 - DNA, 18 bp, Artificial Sequence
  Synthetic construct
catggcggtgacggaagc

SEQ ID NO: 1007 - DNA, 24 bp, Artificial Sequence
  Synthetic construct
ggcacaaaatggaacaggaaaatc

SEQ ID NO: 1008 - DNA, 25 bp, Artificial Sequence
  Synthetic construct
tggcagctgagaacaatacttagtg

SEQ ID NO: 1009 - DNA, 19 bp, Artificial Sequence
  Synthetic construct
gaagcgagcctgttgcgcc

SEQ ID NO: 1010 - DNA, 22 bp, Artificial Sequence
  Synthetic construct
tgtccaggaggcacaaaatgga

SEQ ID NO: 1011 - DNA, 22 bp, Artificial Sequence
  Synthetic construct
atgtagttggcagctgagaaca

SEQ ID NO: 1012 - DNA, 22 bp, Artificial Sequence
  Synthetic construct
atggaacaggaaaatccacaaa

SEQ ID NO: 1013 - DNA, 26 bp, Artificial Sequence
  Synthetic construct
gaacaatacttagtggataccatcga

SEQ ID NO: 1014 - DNA, 25 bp, Artificial Sequence
  Synthetic construct
gctgccaaaaactgactataaatgc

SEQ ID NO: 1015 - DNA, 24 bp, Artificial Sequence
  Synthetic construct
gctttatgatggagttgaagatgc

SEQ ID NO: 1016 - DNA, 25 bp, Artificial Sequence
  Synthetic construct
atgcctttagtgattctattgctgc

SEQ ID NO: 1017 - DNA, 24 bp, Artificial Sequence
  Synthetic construct
ttgcctgaagatttacaactgaag

SEQ ID NO: 1018 - DNA, 25 bp, Artificial Sequence
  Synthetic construct
cctgatctaatgagctttatgatgg

SEQ ID NO: 1019 - DNA, 23 bp, Artificial Sequence
  Synthetic construct
gattctattgctgccaaaaactg

SEQ ID NO: 1020 - DNA, 25 bp, Artificial Sequence
  Synthetic construct
ggatagtgttgcctgaagatttaca

SEQ ID NO: 1021 - DNA, 22 bp, Artificial Sequence
  Synthetic construct
tctattgctgccaaaaactgac

SEQ ID NO: 1022 - DNA, 22 bp, Artificial Sequence
  Synthetic construct
tccaccttaggatagtgttgcc

SEQ ID NO: 1023 - DNA, 22 bp, Artificial Sequence
  Synthetic construct
cccagaatgcctttagtgattc

SEQ ID NO: 1024 - DNA, 26 bp, Artificial Sequence
  Synthetic construct
ctaatgagctttatgatggagttgaa

SEQ ID NO: 1025 - DNA, 20 bp, Artificial Sequence
  Synthetic construct
ccataacatcccagaatgcc

SEQ ID NO: 1026 - DNA, 21 bp, Artificial Sequence
  Synthetic construct
gaatgcagcactctcctgatc

SEQ ID NO: 1027 - DNA, 22 bp, Artificial Sequence
  Synthetic construct
tcgatttcatccataacatccc

SEQ ID NO: 1028 - DNA, 27 bp, Artificial Sequence
  Synthetic construct
caccttaggatagtgttgcctgaagat

SEQ ID NO: 1029 - DNA, 24 bp, Artificial Sequence
  Synthetic construct
taacatcccagaatgcctttagtg

SEQ ID NO: 1030 - DNA, 23 bp, Artificial Sequence
  Synthetic construct
agcactctcctgatctaatgagc

SEQ ID NO: 1031 - DNA, 22 bp, Artificial Sequence
  Synthetic construct
ggtcttctcatcgatttcatcc

SEQ ID NO: 1032 - DNA, 26 bp, Artificial Sequence
  Synthetic construct
gaagagacttccaccttaggatagtg

SEQ ID NO: 1033 - DNA, 24 bp, Artificial Sequence
  Synthetic construct
tttcatccataacatcccagaatg

SEQ ID NO: 1034 - DNA, 26 bp, Artificial Sequence
  Synthetic construct
attattatgtagttggcagctgagaa

SEQ ID NO: 1035 - DNA, 26 bp, Artificial Sequence
  Synthetic construct
tacagctcttgtctattctttaaggc

SEQ ID NO: 1036 - DNA, 26 bp, Artificial Sequence
  Synthetic construct
gtggataccatcgaatagtacaacag

SEQ ID NO: 1037 - DNA, 22 bp, Artificial Sequence
  Synthetic construct
tttgccttcaacttgagagtga

SEQ ID NO: 1038 - DNA, 25 bp, Artificial Sequence
  Synthetic construct
tggcagctgagaacaatacttagtg

SEQ ID NO: 1039 - DNA, 22 bp, Artificial Sequence
  Synthetic construct
atggtactgaagcaggtatccg

SEQ ID NO: 1040 - DNA, 26 bp, Artificial Sequence
  Synthetic construct
gaacaatacttagtggataccatcga

SEQ ID NO: 1041 - DNA, 23 bp, Artificial Sequence
  Synthetic construct
tgctctctaccagaagcatcttc

SEQ ID NO: 1042 - DNA, 27 bp, Artificial Sequence
  Synthetic construct
atgtagttggcagctgagaacaatact

SEQ ID NO: 1043 - DNA, 24 bp, Artificial Sequence
  Synthetic construct
ttaacttgatggtactgaagcagg

SEQ ID NO: 1044 - DNA, 22 bp, Artificial Sequence
  Synthetic construct
tccaccttaggatagtgttgcc

SEQ ID NO: 1045 - DNA, 26 bp, Artificial Sequence
  Synthetic construct
caacttgagagtgattaaatgctctc

SEQ ID NO: 1046 - DNA, 24 bp, Artificial Sequence
  Synthetic construct
ttgcctgaagatttacaactgaag

SEQ ID NO: 1047 - DNA, 21 bp, Artificial Sequence
  Synthetic construct
gcaggtatccgcatacacaag

SEQ ID NO: 1048 - DNA, 25 bp, Artificial Sequence
  Synthetic construct
ggatagtgttgcctgaagatttaca

SEQ ID NO: 1049 - DNA, 27 bp, Artificial Sequence
  Synthetic construct
agtgattaaatgctctctaccagaagc

SEQ ID NO: 1050 - DNA, 27 bp, Artificial Sequence
  Synthetic construct
tgaagatttacaactgaagaatgcaag

SEQ ID NO: 1051 - DNA, 23 bp, Artificial Sequence
  Synthetic construct
actgaagcaggtatccgcataca

SEQ ID NO: 1052 - DNA, 21 bp, Artificial Sequence
  Synthetic construct
ggtcgaaaaccgtgtatgagg

SEQ ID NO: 1053 - DNA, 23 bp, Artificial Sequence
  Synthetic construct
ctaccagaagcatcttctgcttt

SEQ ID NO: 1054 - DNA, 19 bp, Artificial Sequence
  Synthetic construct
agaaccggtcgaaaaccgt

SEQ ID NO: 1055 - DNA, 25 bp, Artificial Sequence
  Synthetic construct
caggaaaatccacaaaataatctgg

SEQ ID NO: 1056 - DNA, 19 bp, Artificial Sequence
  Synthetic construct
cctgcttctgccccagaac

SEQ ID NO: 1057 - DNA, 26 bp, Artificial Sequence
  Synthetic construct
atccacaaaataatctggtgattctg

SEQ ID NO: 1058 - DNA, 18 bp, Artificial Sequence
  Synthetic construct
tctgccccagaaccggtc

SEQ ID NO: 1059 - DNA, 24 bp, Artificial Sequence
  Synthetic construct
ggcacaaaatggaacaggaaaatc

SEQ ID NO: 1060 - DNA, 18 bp, Artificial Sequence
  Synthetic construct
cagtgccccctgcttctg

SEQ ID NO: 1061 - DNA, 22 bp, Artificial Sequence
  Synthetic construct
atggaacaggaaaatccacaaa

SEQ ID NO: 1062 - DNA, 20 bp, Artificial Sequence
  Synthetic construct
gccccagaaccggtcgaaaa

SEQ ID NO: 1063 - DNA, 22 bp, Artificial Sequence
  Synthetic construct
tgtccaggaggcacaaaatgga

SEQ ID NO: 1064 - DNA, 20 bp, Artificial Sequence
  Synthetic construct
ctgtgtttctccggacttcg

SEQ ID NO: 1065 - DNA, 23 bp, Artificial Sequence
  Synthetic construct
tcccaaccaagagttcctatctc

SEQ ID NO: 1066 - DNA, 24 bp, Artificial Sequence
  Synthetic construct
gcaggtctagagcttttctgtgtt

SEQ ID NO: 1067 - DNA, 27 bp, Artificial Sequence
  Synthetic construct
atctcttcaataaggcttgagtagaac

SEQ ID NO: 1068 - DNA, 18 bp, Artificial Sequence
  Synthetic construct
gagcctgttgcgccagtg

SEQ ID NO: 1069 - DNA, 27 bp, Artificial Sequence
  Synthetic construct
caaccaagagttcctatctcttcaata

SEQ ID NO: 1070 - DNA, 20 bp, Artificial Sequence
  Synthetic construct
gcaggacccagcaggtctag

SEQ ID NO: 1071 - DNA, 26 bp, Artificial Sequence
  Synthetic construct
atccacaaaataatctggtgattctg

SEQ ID NO: 1072 - DNA, 20 bp, Artificial Sequence
  Synthetic construct
tttctccggacttcgagcca

SEQ ID NO: 1073 - DNA, 22 bp, Artificial Sequence
  Synthetic construct
tttacctgaggtgtccaggagg

SEQ ID NO: 1074 - DNA, 18 bp, Artificial Sequence
  Synthetic construct
gagcctgttgcgccagtg

SEQ ID NO: 1075 - DNA, 25 bp, Artificial Sequence
  Synthetic construct
gcatcttctgcttttaacttgatgg

SEQ ID NO: 1076 - DNA, 20 bp, Artificial Sequence
  Synthetic construct
gtgacggaagcgagcctgtt

SEQ ID NO: 1077 - DNA, 27 bp, Artificial Sequence
  Synthetic construct
ttctgcttttaacttgatggtactgaa

SEQ ID NO: 1078 - DNA, 19 bp, Artificial Sequence
  Synthetic construct
agaaccggtcgaaaaccgt

SEQ ID NO: 1079 - DNA, 23 bp, Artificial Sequence
  Synthetic construct
ctaccagaagcatcttctgcttt

SEQ ID NO: 1080 - DNA, 20 bp, Artificial Sequence
  Synthetic construct
gccccagaaccggtcgaaaa

SEQ ID NO: 1081 - DNA, 24 bp, Artificial Sequence
  Synthetic construct
ggcacaaaatggaacaggaaaatc

SEQ ID NO: 1082 - DNA, 20 bp, Artificial Sequence
  Synthetic construct
agaactgggatgtggagctg

SEQ ID NO: 1083 - DNA, 23 bp, Artificial Sequence
  Synthetic construct
tgtttctttctcctctgaagagg

SEQ ID NO: 1084 - DNA, 21 bp, Artificial Sequence
  Synthetic construct
ctctatgcttgcgtaaccagc

SEQ ID NO: 1085 - DNA, 20 bp, Artificial Sequence
  Synthetic construct
atgtgcagagcatcaactgg

SEQ ID NO: 1086 - DNA, 25 bp, Artificial Sequence
  Synthetic construct
tttggtgttatctgtttctttctcc

SEQ ID NO: 1087 - DNA, 19 bp, Artificial Sequence
  Synthetic construct
aggtggaggtgcaggactc

SEQ ID NO: 1088 - DNA, 24 bp, Artificial Sequence
  Synthetic construct
ggtttggtttggtgttatctgttt

SEQ ID NO: 1089 - DNA, 19 bp, Artificial Sequence
  Synthetic construct
ggtgacctgctgcagcttc

SEQ ID NO: 1090 - DNA, 21 bp, Artificial Sequence
  Synthetic construct
catcatcatcatcatcctccg

SEQ ID NO: 1091 - DNA, 18 bp, Artificial Sequence
  Synthetic construct
agctggcggaaagcaacc

SEQ ID NO: 1092 - DNA, 24 bp, Artificial Sequence
  Synthetic construct
tctgaagaggagtcatcatcatca

SEQ ID NO: 1093 - DNA, 19 bp, Artificial Sequence
  Synthetic construct
ggacgatgtgcagagcatc

SEQ ID NO: 1094 - DNA, 18 bp, Artificial Sequence
  Synthetic construct
ccgaggaggggagagcat

SEQ ID NO: 1095 - DNA, 19 bp, Artificial Sequence
  Synthetic construct
agagcatcaactggctgcg

SEQ ID NO: 1096 - DNA, 20 bp, Artificial Sequence
  Synthetic construct
catcatcatcctccgaggag

SEQ ID NO: 1097 - DNA, 22 bp, Artificial Sequence
  Synthetic construct
tgacaccacctacttctccgtc

SEQ ID NO: 1098 - DNA, 21 bp, Artificial Sequence
  Synthetic construct
gaacttcactgtcttggcagc

SEQ ID NO: 1099 - DNA, 24 bp, Artificial Sequence
  Synthetic construct
cctacttctccgtcaatgtttcag

SEQ ID NO: 1100 - DNA, 20 bp, Artificial Sequence
  Synthetic construct
cactggaagggcatttgaac

SEQ ID NO: 1101 - DNA, 19 bp, Artificial Sequence
  Synthetic construct
atcacaggggaggaggtgg

SEQ ID NO: 1102 - DNA, 22 bp, Artificial Sequence
  Synthetic construct
ggatgtccaatatggagctacg

SEQ ID NO: 1103 - DNA, 20 bp, Artificial Sequence
  Synthetic construct
gggcagtgacaccacctact

SEQ ID NO: 1104 - DNA, 21 bp, Artificial Sequence
  Synthetic construct
tcttttccatcttttctgggg

SEQ ID NO: 1105 - DNA, 18 bp, Artificial Sequence
  Synthetic construct
ttgcgtaaccagcagccc

SEQ ID NO: 1106 - DNA, 23 bp, Artificial Sequence
  Synthetic construct
gcatttgaacttcactgtcttgg

SEQ ID NO: 1107 - DNA, 20 bp, Artificial Sequence
  Synthetic construct
ccggcctctatgcttgcgta

SEQ ID NO: 1108 - DNA, 22 bp, Artificial Sequence
  Synthetic construct
tccatcttttctggggatgtcc

SEQ ID NO: 1109 - DNA, 18 bp, Artificial Sequence
  Synthetic construct
aggtgcaggactccgtgc

SEQ ID NO: 1110 - DNA, 21 bp, Artificial Sequence
  Synthetic construct
gcatgcaatttcttttccatc

SEQ ID NO: 1111 - DNA, 18 bp, Artificial Sequence
  Synthetic construct
accgcacccgcatcacag

SEQ ID NO: 1112 - DNA, 20 bp, Artificial Sequence
  Synthetic construct
cggcactgcatgcaatttct

SEQ ID NO: 1113 - DNA, 18 bp, Artificial Sequence
  Synthetic construct
taaccagcagcccctcgg

SEQ ID NO: 1114 - DNA, 19 bp, Artificial Sequence
  Synthetic construct
tttcaaccagcgcagtgtg

SEQ ID NO: 1115 - DNA, 20 bp, Artificial Sequence
  Synthetic construct
ccctcgggcagtgacaccac

SEQ ID NO: 1116 - DNA, 26 bp, Artificial Sequence
  Synthetic construct
actggaagggcatttgaacttcactg

SEQ ID NO: 1117 - DNA, 20 bp, Artificial Sequence
  Synthetic construct
gaaagcaaccgcacccgcat

SEQ ID NO: 1118 - DNA, 27 bp, Artificial Sequence
  Synthetic construct
cttttctggggatgtccaatatggagc

SEQ ID NO: 1119 - DNA, 20 bp, Artificial Sequence
  Synthetic construct
cccgcagactccggcctcta

SEQ ID NO: 1120 - DNA, 20 bp, Artificial Sequence
  Synthetic construct
gggtcccactggaagggcat

SEQ ID NO: 1121 - DNA, 18 bp, Artificial Sequence
  Synthetic construct
agcagcccctcgggcagt

SEQ ID NO: 1122 - DNA, 20 bp, Artificial Sequence
  Synthetic construct
gcagtgtggggtttggggtc

SEQ ID NO: 1123 - DNA, 18 bp, Artificial Sequence
  Synthetic construct
acccgcatcacaggggag

SEQ ID NO: 1124 - DNA, 18 bp, Artificial Sequence
  Synthetic construct
tcttggcagccggcactg

SEQ ID NO: 1125 - DNA, 19 bp, Artificial Sequence
  Synthetic construct
caggactccgtgcccgcag

SEQ ID NO: 1126 - DNA, 19 bp, Artificial Sequence
  Synthetic construct
gggtttggggtcccactgg

SEQ ID NO: 1127 - DNA, 18 bp, Artificial Sequence
  Synthetic construct
ggtgcagctggcggaaag

SEQ ID NO: 1128 - DNA, 20 bp, Artificial Sequence
  Synthetic construct
accagcgcagtgtggggttt

SEQ ID NO: 1129 - DNA, 19 bp, Artificial Sequence
  Synthetic construct
ccgaccttgcctgaacaag

SEQ ID NO: 1130 - DNA, 21 bp, Artificial Sequence
  Synthetic construct
catcatcatcatcatcctccg

SEQ ID NO: 1131 - DNA, 20 bp, Artificial Sequence
  Synthetic construct
agaactgggatgtggagctg

SEQ ID NO: 1132 - DNA, 18 bp, Artificial Sequence
  Synthetic construct
ccgaggaggggagagcat

SEQ ID NO: 1133 - DNA, 20 bp, Artificial Sequence
  Synthetic construct
gtcacagccacactctgcac

SEQ ID NO: 1134 - DNA, 20 bp, Artificial Sequence
  Synthetic construct
catcatcatcctccgaggag

SEQ ID NO: 1135 - DNA, 19 bp, Artificial Sequence
  Synthetic construct
acactctgcaccgctaggc

SEQ ID NO: 1136 - DNA, 24 bp, Artificial Sequence
  Synthetic construct
tctgaagaggagtcatcatcatca

SEQ ID NO: 1137 - DNA, 19 bp, Artificial Sequence
  Synthetic construct
ctgtgctggtcacagccac

SEQ ID NO: 1138 - DNA, 23 bp, Artificial Sequence
  Synthetic construct
tgtttctttctcctctgaagagg

SEQ ID NO: 1139 - DNA, 20 bp, Artificial Sequence
  Synthetic construct
gaagtgcctcctcttctggg

SEQ ID NO: 1140 - DNA, 24 bp, Artificial Sequence
  Synthetic construct
ggtttggtttggtgttatctgttt

SEQ ID NO: 1141 - DNA, 20 bp, Artificial Sequence
  Synthetic construct
gcctcctcttctgggctgtg

SEQ ID NO: 1142 - DNA, 20 bp, Artificial Sequence
  Synthetic construct
gcatacggtttggtttggtg

SEQ ID NO: 1143 - DNA, 19 bp, Artificial Sequence
  Synthetic construct
taggccgtccccgaccttg

SEQ ID NO: 1144 - DNA, 22 bp, Artificial Sequence
  Synthetic construct
tttctggggatgtccaatatgg

SEQ ID NO: 1145 - DNA, 20 bp, Artificial Sequence
  Synthetic construct
cgtccccgaccttgcctgaa

SEQ ID NO: 1146 - DNA, 26 bp, Artificial Sequence
  Synthetic construct
ctggggatgtccaatatggagctacg

SEQ ID NO: 1147 - DNA, 20 bp, Artificial Sequence
  Synthetic construct
gtcacagccacactctgcac

SEQ ID NO: 1148 - DNA, 20 bp, Artificial Sequence
  Synthetic construct
accaagtccaaatggcaagg

SEQ ID NO: 1149 - DNA, 20 bp, Artificial Sequence
  Synthetic construct
agaactgggatgtggagctg

SEQ ID NO: 1150 - DNA, 22 bp, Artificial Sequence
  Synthetic construct
acttagcctcctggagatctgg

SEQ ID NO: 1151 - DNA, 20 bp, Artificial Sequence
  Synthetic construct
gaagtgcctcctcttctggg

SEQ ID NO: 1152 - DNA, 20 bp, Artificial Sequence
  Synthetic construct
aaatggcaagggagtgatgg

SEQ ID NO: 1153 - DNA, 19 bp, Artificial Sequence
  Synthetic construct
acactctgcaccgctaggc

SEQ ID NO: 1154 - DNA, 21 bp, Artificial Sequence
  Synthetic construct
ccgagtaccaagtccaaatgg

SEQ ID NO: 1155 - DNA, 19 bp, Artificial Sequence
  Synthetic construct
ccgaccttgcctgaacaag

SEQ ID NO: 1156 - DNA, 20 bp, Artificial Sequence
  Synthetic construct
cagggataccaccacctgtt

SEQ ID NO: 1157 - DNA, 19 bp, Artificial Sequence
  Synthetic construct
ctgtgctggtcacagccac

SEQ ID NO: 1158 - DNA, 22 bp, Artificial Sequence
  Synthetic construct
cactaagccgagtaccaagtcc

SEQ ID NO: 1159 - DNA, 20 bp, Artificial Sequence
  Synthetic construct
gcctcctcttctgggctgtg

SEQ ID NO: 1160 - DNA, 22 bp, Artificial Sequence
  Synthetic construct
caagggagtgatggagtggaag

SEQ ID NO: 1161 - DNA, 22 bp, Artificial Sequence
  Synthetic construct
ctaactgcagaactgggatgtg

SEQ ID NO: 1162 - DNA, 20 bp, Artificial Sequence
  Synthetic construct
gagcaccacttagcctcctg

SEQ ID NO: 1163 - DNA, 20 bp, Artificial Sequence
  Synthetic construct
atgtggagctggaagtgcct

SEQ ID NO: 1164 - DNA, 18 bp, Artificial Sequence
  Synthetic construct
gagtggaagctggccgag

SEQ ID NO: 1165 - DNA, 20 bp, Artificial Sequence
  Synthetic construct
tcttctgggctgtgctggtc

SEQ ID NO: 1166 - DNA, 20 bp, Artificial Sequence
  Synthetic construct
gtgatggagtggaagctggc

SEQ ID NO: 1167 - DNA, 22 bp, Artificial Sequence
  Synthetic construct
ttgtcaccaacctctaactgca

SEQ ID NO: 1168 - DNA, 19 bp, Artificial Sequence
  Synthetic construct
tcctggagatctgggcaag

SEQ ID NO: 1169 - DNA, 20 bp, Artificial Sequence
  Synthetic construct
agctggaagtgcctcctctt

SEQ ID NO: 1170 - DNA, 19 bp, Artificial Sequence
  Synthetic construct
ctggccgagcaccacttag

SEQ ID NO: 1171 - DNA, 20 bp, Artificial Sequence
  Synthetic construct
cgtccccgaccttgcctgaa

SEQ ID NO: 1172 - DNA, 23 bp, Artificial Sequence
  Synthetic construct
ccaccacctgttcagggcctcta

SEQ ID NO: 1173 - DNA, 19 bp, Artificial Sequence
  Synthetic construct
taggccgtccccgaccttg

SEQ ID NO: 1174 - DNA, 22 bp, Artificial Sequence
  Synthetic construct
cctctccagcagagcagggata

SEQ ID NO: 1175 - DNA, 23 bp, Artificial Sequence
  Synthetic construct
acagccacactctgcaccgctag

SEQ ID NO: 1176 - DNA, 27 bp, Artificial Sequence
  Synthetic construct
gagtaccaagtccaaatggcaagggag

SEQ ID NO: 1177 - DNA, 23 bp, Artificial Sequence
  Synthetic construct
gtgctggtcacagccacactctg

SEQ ID NO: 1178 - DNA, 26 bp, Artificial Sequence
  Synthetic construct
cacctgttcagggcctctaatcacta

SEQ ID NO: 1179 - DNA, 19 bp, Artificial Sequence
  Synthetic construct
ctgcaccgctaggccgtcc

SEQ ID NO: 1180 - DNA, 24 bp, Artificial Sequence
  Synthetic construct
cagggcctctaatcactaagccga

SEQ ID NO: 1181 - DNA, 26 bp, Artificial Sequence
  Synthetic construct
tcaccaacctctaactgcagaactgg

SEQ ID NO: 1182 - DNA, 20 bp, Artificial Sequence
  Synthetic construct
ggaagctggccgagcaccac

SEQ ID NO: 1183 - DNA, 20 bp, Artificial Sequence
  Synthetic construct
agatgtggagccttgtcacc

SEQ ID NO: 1184 - DNA, 25 bp, Artificial Sequence
  Synthetic construct
ctctaatcactaagccgagtaccaa

SEQ ID NO: 1185 - DNA, 20 bp, Artificial Sequence
  Synthetic construct
agatgtggagccttgtcacc

SEQ ID NO: 1186 - DNA, 25 bp, Artificial Sequence
  Synthetic construct
tttggtgttatctgtttctttctcc

SEQ ID NO: 1187 - DNA, 20 bp, Artificial Sequence
  Synthetic construct
atgtggagctggaagtgcct

SEQ ID NO: 1188 - DNA, 24 bp, Artificial Sequence
  Synthetic construct
tctgaagaggagtcatcatcatca

SEQ ID NO: 1189 - DNA, 22 bp, Artificial Sequence
  Synthetic construct
ctaactgcagaactgggatgtg

SEQ ID NO: 1190 - DNA, 20 bp, Artificial Sequence
  Synthetic construct
catcatcatcctccgaggag

SEQ ID NO: 1191 - DNA, 20 bp, Artificial Sequence
  Synthetic construct
gtcacagccacactctgcac

SEQ ID NO: 1192 - DNA, 20 bp, Artificial Sequence
  Synthetic construct
cactggaagggcatttgaac

SEQ ID NO: 1193 - DNA, 19 bp, Artificial Sequence
  Synthetic construct
ccgaccttgcctgaacaag

SEQ ID NO: 1194 - DNA, 22 bp, Artificial Sequence
  Synthetic construct
ggatgtccaatatggagctacg

SEQ ID NO: 1195 - DNA, 19 bp, Artificial Sequence
  Synthetic construct
acactctgcaccgctaggc

SEQ ID NO: 1196 - DNA, 21 bp, Artificial Sequence
  Synthetic construct
gaacttcactgtcttggcagc

SEQ ID NO: 1197 - DNA, 20 bp, Artificial Sequence
  Synthetic construct
gcctcctcttctgggctgtg

SEQ ID NO: 1198 - DNA, 20 bp, Artificial Sequence
  Synthetic construct
cggcactgcatgcaatttct

SEQ ID NO: 1199 - DNA, 23 bp, Artificial Sequence
  Synthetic construct
gtgctggtcacagccacactctg

SEQ ID NO: 1200 - DNA, 26 bp, Artificial Sequence
  Synthetic construct
actggaagggcatttgaacttcactg

SEQ ID NO: 1201 - DNA, 23 bp, Artificial Sequence
  Synthetic construct
acagccacactctgcaccgctag

SEQ ID NO: 1202 - DNA, 20 bp, Artificial Sequence
  Synthetic construct
gggtcccactggaagggcat

SEQ ID NO: 1203 - DNA, 19 bp, Artificial Sequence
  Synthetic construct
ctgcaccgctaggccgtcc

SEQ ID NO: 1204 - DNA, 20 bp, Artificial Sequence
  Synthetic construct
gcagtgtggggtttggggtc

SEQ ID NO: 1205 - DNA, 20 bp, Artificial Sequence
  Synthetic construct
gagccttgtcaccaacctct

SEQ ID NO: 1206 - DNA, 21 bp, Artificial Sequence
  Synthetic construct
tcttttccatcttttctgggg

SEQ ID NO: 1207 - DNA, 26 bp, Artificial Sequence
  Synthetic construct
tcaccaacctctaactgcagaactgg

SEQ ID NO: 1208 - DNA, 22 bp, Artificial Sequence
  Synthetic construct
tccatcttttctggggatgtcc

SEQ ID NO: 1209 - DNA, 20 bp, Artificial Sequence
  Synthetic construct
cgtccccgaccttgcctgaa

SEQ ID NO: 1210 - DNA, 18 bp, Artificial Sequence
  Synthetic construct
tcttggcagccggcactg

SEQ ID NO: 1211 - DNA, 19 bp, Artificial Sequence
  Synthetic construct
taggccgtccccgaccttg

SEQ ID NO: 1212 - DNA, 20 bp, Artificial Sequence
  Synthetic construct
accagcgcagtgtggggttt

SEQ ID NO: 1213 - DNA, 20 bp, Artificial Sequence
  Synthetic construct
catggagatgtggagccttg

SEQ ID NO: 1214 - DNA, 22 bp, Artificial Sequence
  Synthetic construct
tttctggggatgtccaatatgg

SEQ ID NO: 1215 - DNA, 22 bp, Artificial Sequence
  Synthetic construct
agtatccatggagatgtggagc

SEQ ID NO: 1216 - DNA, 23 bp, Artificial Sequence
  Synthetic construct
gcatttgaacttcactgtcttgg

SEQ ID NO: 1217 - DNA, 20 bp, Artificial Sequence
  Synthetic construct
aggatcgagctcactgtgga

SEQ ID NO: 1218 - DNA, 21 bp, Artificial Sequence
  Synthetic construct
ctgcatgcaatttcttttcca

SEQ ID NO: 1219 - DNA, 27 bp, Artificial Sequence
  Synthetic construct
gtggagccttgtcaccaacctctaact

SEQ ID NO: 1220 - DNA, 20 bp, Artificial Sequence
  Synthetic construct
ttgccatttttcaaccagcg

SEQ ID NO: 1221 - DNA, 22 bp, Artificial Sequence
  Synthetic construct
tcgagctcactgtggagtatcc

SEQ ID NO: 1222 - DNA, 20 bp, Artificial Sequence
  Synthetic construct
gcatacggtttggtttggtg

SEQ ID NO: 1223 - DNA, 19 bp, Artificial Sequence
  Synthetic construct
ccgaccttgcctgaacaag

SEQ ID NO: 1224 - DNA, 25 bp, Artificial Sequence
  Synthetic construct
tttggtgttatctgtttctttctcc

SEQ ID NO: 1225 - DNA, 19 bp, Artificial Sequence
  Synthetic construct
ctgtgctggtcacagccac

SEQ ID NO: 1226 - DNA, 24 bp, Artificial Sequence
  Synthetic construct
tctgaagaggagtcatcatcatca

SEQ ID NO: 1227 - DNA, 22 bp, Artificial Sequence
  Synthetic construct
ctaactgcagaactgggatgtg

SEQ ID NO: 1228 - DNA, 22 bp, Artificial Sequence
  Synthetic construct
ggatgtccaatatggagctacg

SEQ ID NO: 1229 - DNA, 20 bp, Artificial Sequence
  Synthetic construct
agatgtggagccttgtcacc

SEQ ID NO: 1230 - DNA, 20 bp, Artificial Sequence
  Synthetic construct
gcatacggtttggtttggtg

SEQ ID NO: 1231 - DNA, 20 bp, Artificial Sequence
  Synthetic construct
agaactgggatgtggagctg

SEQ ID NO: 1232 - DNA, 20 bp, Artificial Sequence
  Synthetic construct
tgctggttacgcaagcatag

SEQ ID NO: 1233 - DNA, 22 bp, Artificial Sequence
  Synthetic construct
ttgtcaccaacctctaactgca

SEQ ID NO: 1234 - DNA, 20 bp, Artificial Sequence
  Synthetic construct
ttgatgctctgcacatcgtc

SEQ ID NO: 1235 - DNA, 20 bp, Artificial Sequence
  Synthetic construct
gtcacagccacactctgcac

SEQ ID NO: 1236 - DNA, 22 bp, Artificial Sequence
  Synthetic construct
acattgacggagaagtaggtgg

SEQ ID NO: 1237 - DNA, 20 bp, Artificial Sequence
  Synthetic construct
atgtggagctggaagtgcct

SEQ ID NO: 1238 - DNA, 20 bp, Artificial Sequence
  Synthetic construct
aagcatagaggccggagtct

SEQ ID NO: 1239 - DNA, 20 bp, Artificial Sequence
  Synthetic construct
agatgtggagccttgtcacc

SEQ ID NO: 1240 - DNA, 19 bp, Artificial Sequence
  Synthetic construct
gcagccagttgatgctctg

SEQ ID NO: 1241 - DNA, 20 bp, Artificial Sequence
  Synthetic construct
gagccttgtcaccaacctct

SEQ ID NO: 1242 - DNA, 19 bp, Artificial Sequence
  Synthetic construct
agtcctgcacctccacctc

SEQ ID NO: 1243 - DNA, 19 bp, Artificial Sequence
  Synthetic construct
ccgaccttgcctgaacaag

SEQ ID NO: 1244 - DNA, 22 bp, Artificial Sequence
  Synthetic construct
agaagtaggtggtgtcactgcc

SEQ ID NO: 1245 - DNA, 20 bp, Artificial Sequence
  Synthetic construct
aggatcgagctcactgtgga

SEQ ID NO: 1246 - DNA, 21 bp, Artificial Sequence
  Synthetic construct
gaccaggaaggactccacttc

SEQ ID NO: 1247 - DNA, 22 bp, Artificial Sequence
  Synthetic construct
ctaactgcagaactgggatgtg

SEQ ID NO: 1248 - DNA, 19 bp, Artificial Sequence
  Synthetic construct
tacgcaagcatagaggccg

SEQ ID NO: 1249 - DNA, 22 bp, Artificial Sequence
  Synthetic construct
agtatccatggagatgtggagc

SEQ ID NO: 1250 - DNA, 18 bp, Artificial Sequence
  Synthetic construct
gttgctttccgccagctg

SEQ ID NO: 1251 - DNA, 20 bp, Artificial Sequence
  Synthetic construct
gaagtgcctcctcttctggg

SEQ ID NO: 1252 - DNA, 20 bp, Artificial Sequence
  Synthetic construct
tccacctcctcccctgtgat

SEQ ID NO: 1253 - DNA, 20 bp, Artificial Sequence
  Synthetic construct
tcttctgggctgtgctggtc

SEQ ID NO: 1254 - DNA, 18 bp, Artificial Sequence
  Synthetic construct
cgaggggctgctggttac

SEQ ID NO: 1255 - DNA, 22 bp, Artificial Sequence
  Synthetic construct
tcgagctcactgtggagtatcc

SEQ ID NO: 1256 - DNA, 18 bp, Artificial Sequence
  Synthetic construct
aagctgcagcaggtcacc

SEQ ID NO: 1257 - DNA, 19 bp, Artificial Sequence
  Synthetic construct
acactctgcaccgctaggc

SEQ ID NO: 1258 - DNA, 18 bp, Artificial Sequence
  Synthetic construct
gcacctccacctcctccc

SEQ ID NO: 1259 - DNA, 20 bp, Artificial Sequence
  Synthetic construct
agctggaagtgcctcctctt

SEQ ID NO: 1260 - DNA, 18 bp, Artificial Sequence
  Synthetic construct
acagcgaagctgcagcag

SEQ ID NO: 1261 - DNA, 20 bp, Artificial Sequence
  Synthetic construct
gcctcctcttctgggctgtg

SEQ ID NO: 1262 - DNA, 18 bp, Artificial Sequence
  Synthetic construct
cgggtgcggttgctttcc

SEQ ID NO: 1263 - DNA, 26 bp, Artificial Sequence
  Synthetic construct
tcaccaacctctaactgcagaactgg

SEQ ID NO: 1264 - DNA, 22 bp, Artificial Sequence
  Synthetic construct
ggaaggactccacttccacagg

SEQ ID NO: 1265 - DNA, 23 bp, Artificial Sequence
  Synthetic construct
acagccacactctgcaccgctag

SEQ ID NO: 1266 - DNA, 19 bp, Artificial Sequence
  Synthetic construct
tctgcacatcgtcccgcag

SEQ ID NO: 1267 - DNA, 19 bp, Artificial Sequence
  Synthetic construct
ctgtgctggtcacagccac

SEQ ID NO: 1268 - DNA, 18 bp, Artificial Sequence
  Synthetic construct
tggtgtcactgcccgagg

SEQ ID NO: 1269 - DNA, 23 bp, Artificial Sequence
  Synthetic construct
gtgctggtcacagccacactctg

SEQ ID NO: 1270 - DNA, 23 bp, Artificial Sequence
  Synthetic construct
agccagttgatgctctgcacatc

SEQ ID NO: 1271 - DNA, 27 bp, Artificial Sequence
  Synthetic construct
gtggagccttgtcaccaacctctaact

SEQ ID NO: 1272 - DNA, 19 bp, Artificial Sequence
  Synthetic construct
cgtcccgcagccagttgat

SEQ ID NO: 1273 - DNA, 20 bp, Artificial Sequence
  Synthetic construct
cgtccccgaccttgcctgaa

SEQ ID NO: 1274 - DNA, 20 bp, Artificial Sequence
  Synthetic construct
tcctcccctgtgatgcgggt

SEQ ID NO: 1275 - DNA, 19 bp, Artificial Sequence
  Synthetic construct
ctgcaccgctaggccgtcc

SEQ ID NO: 1276 - DNA, 20 bp, Artificial Sequence
  Synthetic construct
gagtctgcgggcacggagtc

SEQ ID NO: 1277 - DNA, 22 bp, Artificial Sequence
  Synthetic construct
cagtttgaaaaggaggatcgag

SEQ ID NO: 1278 - DNA, 20 bp, Artificial Sequence
  Synthetic construct
gggtggaccaggaaggactc

SEQ ID NO: 1279 - DNA, 19 bp, Artificial Sequence
  Synthetic construct
taggccgtccccgaccttg

SEQ ID NO: 1280 - DNA, 19 bp, Artificial Sequence
  Synthetic construct
ctttccgccagctgcaccc

SEQ ID NO: 1281 - DNA, 22 bp, Artificial Sequence
  Synthetic construct
aaaaggaggatcgagctcactg

SEQ ID NO: 1282 - DNA, 18 bp, Artificial Sequence
  Synthetic construct
cagccgacagcgaagctg

SEQ ID NO: 1283 - DNA, 22 bp, Artificial Sequence
  Synthetic construct
ctgtggagtatccatggagatg

SEQ ID NO: 1284 - DNA, 18 bp, Artificial Sequence
  Synthetic construct
cacggagtcctgcacctc

SEQ ID NO: 1285 - DNA, 23 bp, Artificial Sequence
  Synthetic construct
ccatggagatgtggagccttgtc

SEQ ID NO: 1286 - DNA, 19 bp, Artificial Sequence
  Synthetic construct
atcgtcccgcagccgacag

SEQ ID NO: 1287 - DNA, 27 bp, Artificial Sequence
  Synthetic construct
aggaggatcgagctcactgtggagtat

SEQ ID NO: 1288 - DNA, 20 bp, Artificial Sequence
  Synthetic construct
aggtcaccggggtggaccag

SEQ ID NO: 1289 - DNA, 27 bp, Artificial Sequence
  Synthetic construct
gagctcactgtggagtatccatggaga

SEQ ID NO: 1290 - DNA, 18 bp, Artificial Sequence
  Synthetic construct
ccagctgcaccccgtccc

SEQ ID NO: 1291 - DNA, 18 bp, Artificial Sequence
  Synthetic construct
ccaggacccgaacagagc

SEQ ID NO: 1292 - DNA, 20 bp, Artificial Sequence
  Synthetic construct
ctccacttccacaggggctc

SEQ ID NO: 1293 - DNA, 18 bp, Artificial Sequence
  Synthetic construct
aggcggaacctccacgcc

SEQ ID NO: 1294 - DNA, 19 bp, Artificial Sequence
  Synthetic construct
tgcagcaggtcaccggggt

SEQ ID NO: 1295 - DNA, 18 bp, Artificial Sequence
  Synthetic construct
acacgcccgctcgcacaa

SEQ ID NO: 1296 - DNA, 20 bp, Artificial Sequence
  Synthetic construct
cttccacaggggctccccag

SEQ ID NO: 1297 - DNA, 20 bp, Artificial Sequence
  Synthetic construct
ggactctcccgaggcggaac

SEQ ID NO: 1298 - DNA, 18 bp, Artificial Sequence
  Synthetic construct
aggggctccccagggctg

SEQ ID NO: 1299 - DNA, 19 bp, Artificial Sequence
  Synthetic construct
aacctccacgccgagcgag

SEQ ID NO: 1300 - DNA, 20 bp, Artificial Sequence
  Synthetic construct
tagaggccggagtctgcggg

SEQ ID NO: 1301 - DNA, 19 bp, Artificial Sequence
  Synthetic construct
ctgcaccgctaggccgtcc

SEQ ID NO: 1302 - DNA, 23 bp, Artificial Sequence
  Synthetic construct
ccatcttttctggggatgtccaa

SEQ ID NO: 1303 - DNA, 20 bp, Artificial Sequence
  Synthetic construct
tgcagatgggattaacgtcc

SEQ ID NO: 1304 - DNA, 21 bp, Artificial Sequence
  Synthetic construct
gtgtcatcctcatcatctccg

SEQ ID NO: 1305 - DNA, 19 bp, Artificial Sequence
  Synthetic construct
tttcatctgcctggtcgtg

SEQ ID NO: 1306 - DNA, 21 bp, Artificial Sequence
  Synthetic construct
gtgtcatcctcatcatctccg

SEQ ID NO: 1307 - DNA, 19 bp, Artificial Sequence
  Synthetic construct
tcaccatggcaaccttgtc

SEQ ID NO: 1308 - DNA, 20 bp, Artificial Sequence
  Synthetic construct
acaaaatcttccgcaccatc

SEQ ID NO: 1309 - DNA, 21 bp, Artificial Sequence
  Synthetic construct
ggccctccttcagtttagttg

SEQ ID NO: 1310 - DNA, 26 bp, Artificial Sequence
  Synthetic construct
tcttgttgttactgttctcactgaca

SEQ ID NO: 1311 - DNA, 20 bp, Artificial Sequence
  Synthetic construct
tgcagatgggattaacgtcc

SEQ ID NO: 1312 - DNA, 20 bp, Artificial Sequence
  Synthetic construct
atctccggatgagatggcat

SEQ ID NO: 1313 - DNA, 19 bp, Artificial Sequence
  Synthetic construct
gggtcgtttcatctgcctg

SEQ ID NO: 1314 - DNA, 20 bp, Artificial Sequence
  Synthetic construct
accatcggtgtcatcctcat

SEQ ID NO: 1315 - DNA, 22 bp, Artificial Sequence
  Synthetic construct
gattggtaccgtaaccatggtc

SEQ ID NO: 1316 - DNA, 22 bp, Artificial Sequence
  Synthetic construct
ctcatcatctccggatgagatg

SEQ ID NO: 1317 - DNA, 18 bp, Artificial Sequence
  Synthetic construct
tggtcgtggtcaccatgg

SEQ ID NO: 1318 - DNA, 21 bp, Artificial Sequence
  Synthetic construct
ctcactgacaaaatcttccgc

SEQ ID NO: 1319 - DNA, 20 bp, Artificial Sequence
  Synthetic construct
atctgcctggtcgtggtcac

SEQ ID NO: 1320 - DNA, 20 bp, Artificial Sequence
  Synthetic construct
atcttccgcaccatcggtgt

SEQ ID NO: 1321 - DNA, 19 bp, Artificial Sequence
  Synthetic construct
atggcaaccttgtccctgg

SEQ ID NO: 1322 - DNA, 27 bp, Artificial Sequence
  Synthetic construct
ttactgttctcactgacaaaatcttcc

SEQ ID NO: 1323 - DNA, 23 bp, Artificial Sequence
  Synthetic construct
tgaggataccacattagagccag

SEQ ID NO: 1324 - DNA, 22 bp, Artificial Sequence
  Synthetic construct
tttctgtgttggtccagtatgg

SEQ ID NO: 1325 - DNA, 25 bp, Artificial Sequence
  Synthetic construct
ccttcagtttagttgaggataccac

SEQ ID NO: 1326 - DNA, 20 bp, Artificial Sequence
  Synthetic construct
gttggtccagtatggtgctc

SEQ ID NO: 1327 - DNA, 27 bp, Artificial Sequence
  Synthetic construct
gtttagttgaggataccacattagagc

SEQ ID NO: 1328 - DNA, 20 bp, Artificial Sequence
  Synthetic construct
ccgcttttccatcttttctg

SEQ ID NO: 1329 - DNA, 20 bp, Artificial Sequence
  Synthetic construct
tcgtggtcaccatggcaacc

SEQ ID NO: 1330 - DNA, 27 bp, Artificial Sequence
  Synthetic construct
tccatcttttctgtgttggtccagtat

SEQ ID NO: 1331 - DNA, 18 bp, Artificial Sequence
  Synthetic construct
accttgtccctggcccgg

SEQ ID NO: 1332 - DNA, 20 bp, Artificial Sequence
  Synthetic construct
catggagccgcttttccatc

SEQ ID NO: 1333 - DNA, 20 bp, Artificial Sequence
  Synthetic construct
gaagcacatcgtcatcaacg

SEQ ID NO: 1334 - DNA, 21 bp, Artificial Sequence
  Synthetic construct
aagtgggagacttggttctgc

SEQ ID NO: 1335 - DNA, 22 bp, Artificial Sequence
  Synthetic construct
atcaatagctcagaggtggagg

SEQ ID NO: 1336 - DNA, 20 bp, Artificial Sequence
  Synthetic construct
ctgtacctgcggaacgtgtc

SEQ ID NO: 1337 - DNA, 22 bp, Artificial Sequence
  Synthetic construct
gagaactgcaaagtgggagact

SEQ ID NO: 1338 - DNA, 21 bp, Artificial Sequence
  Synthetic construct
gaggtggaggtcctgtacctg

SEQ ID NO: 1339 - DNA, 20 bp, Artificial Sequence
  Synthetic construct
aggctgtcacatgtgaggtg

SEQ ID NO: 1340 - DNA, 20 bp, Artificial Sequence
  Synthetic construct
aattccatcggcctctccta

SEQ ID NO: 1341 - DNA, 20 bp, Artificial Sequence
  Synthetic construct
tccagggagaactgcaaagt

SEQ ID NO: 1342 - DNA, 19 bp, Artificial Sequence
  Synthetic construct
aggcgagtacacctgcctc

SEQ ID NO: 1343 - DNA, 20 bp, Artificial Sequence
  Synthetic construct
agacttggttctgcctgctg

SEQ ID NO: 1344 - DNA, 24 bp, Artificial Sequence
  Synthetic construct
actgcagacatcaatagctcagag

SEQ ID NO: 1345 - DNA, 20 bp, Artificial Sequence
  Synthetic construct
tggagtcaggctgtcacatg

SEQ ID NO: 1346 - DNA, 20 bp, Artificial Sequence
  Synthetic construct
gctcagaggtggaggtcctg

SEQ ID NO: 1347 - DNA, 24 bp, Artificial Sequence
  Synthetic construct
actgcaaagtgggagacttggttc

SEQ ID NO: 1348 - DNA, 20 bp, Artificial Sequence
  Synthetic construct
aggtcctgtacctgcggaac

SEQ ID NO: 1349 - DNA, 19 bp, Artificial Sequence
  Synthetic construct
acatgtgaggtgggggatg

SEQ ID NO: 1350 - DNA, 19 bp, Artificial Sequence
  Synthetic construct
gaacgtgtcagccgaggac

SEQ ID NO: 1351 - DNA, 20 bp, Artificial Sequence
  Synthetic construct
gttctgcctgctggagtcag

SEQ ID NO: 1352 - DNA, 27 bp, Artificial Sequence
  Synthetic construct
aatagctcagaggtggaggtcctgtac

SEQ ID NO: 1353 - DNA, 20 bp, Artificial Sequence
  Synthetic construct
cctgctggagtcaggctgtc

SEQ ID NO: 1354 - DNA, 19 bp, Artificial Sequence
  Synthetic construct
ctgcggaacgtgtcagccg

SEQ ID NO: 1355 - DNA, 20 bp, Artificial Sequence
  Synthetic construct
gtgggggatgcgcccagtac

SEQ ID NO: 1356 - DNA, 19 bp, Artificial Sequence
  Synthetic construct
cttcggatgcaagtccagg

SEQ ID NO: 1357 - DNA, 21 bp, Artificial Sequence
  Synthetic construct
aagtcctccagtgagtcatgc

SEQ ID NO: 1358 - DNA, 23 bp, Artificial Sequence
  Synthetic construct
ttgtgaagcttgtagtagagccc

SEQ ID NO: 1359 - DNA, 20 bp, Artificial Sequence
  Synthetic construct
agcatgaagctggagtcgtc

SEQ ID NO: 1360 - DNA, 20 bp, Artificial Sequence
  Synthetic construct
tgtggtggtctgacagttcg

SEQ ID NO: 1361 - DNA, 20 bp, Artificial Sequence
  Synthetic construct
ctacgtgcccgagtacagct

SEQ ID NO: 1362 - DNA, 20 bp, Artificial Sequence
  Synthetic construct
tccagagtgtggttgtggtg

SEQ ID NO: 1363 - DNA, 20 bp, Artificial Sequence
  Synthetic construct
atcaccacctacccgcccta

SEQ ID NO: 1364 - DNA, 20 bp, Artificial Sequence
  Synthetic construct
attggcattcctcctccaga

SEQ ID NO: 1365 - DNA, 21 bp, Artificial Sequence
  Synthetic construct
agtacagctccggactcttcc

SEQ ID NO: 1366 - DNA, 20 bp, Artificial Sequence
  Synthetic construct
gtgtggttgtggtggtctga

SEQ ID NO: 1367 - DNA, 20 bp, Artificial Sequence
  Synthetic construct
accaccccatcaccacctac

SEQ ID NO: 1368 - DNA, 21 bp, Artificial Sequence
  Synthetic construct
tagtagagcccacaggcattg

SEQ ID NO: 1369 - DNA, 20 bp, Artificial Sequence
  Synthetic construct
aagctggagtcgtcccactc

SEQ ID NO: 1370 - DNA, 20 bp, Artificial Sequence
  Synthetic construct
tctgacagttcgcacaggac

SEQ ID NO: 1371 - DNA, 19 bp, Artificial Sequence
  Synthetic construct
ctcctcgtcgacccaccac

SEQ ID NO: 1372 - DNA, 19 bp, Artificial Sequence
  Synthetic construct
cacaggcattgcagacagg

SEQ ID NO: 1373 - DNA, 18 bp, Artificial Sequence
  Synthetic construct
ctcccgtggcagcatgac

SEQ ID NO: 1374 - DNA, 22 bp, Artificial Sequence
  Synthetic construct
attcctcctccagagtgtggtt

SEQ ID NO: 1375 - DNA, 22 bp, Artificial Sequence
  Synthetic construct
aaagagtgcctcaagtaccagg

SEQ ID NO: 1376 - DNA, 18 bp, Artificial Sequence
  Synthetic construct
tgctctcctggctgcaga

SEQ ID NO: 1377 - DNA, 19 bp, Artificial Sequence
  Synthetic construct
acctacccgccctacgtgc

SEQ ID NO: 1378 - DNA, 19 bp, Artificial Sequence
  Synthetic construct
gacgtccctgctctcctgg

SEQ ID NO: 1379 - DNA, 20 bp, Artificial Sequence
  Synthetic construct
ccgacagcatgaagctggag

SEQ ID NO: 1380 - DNA, 20 bp, Artificial Sequence
  Synthetic construct
agttcgcacaggacgtccct

SEQ ID NO: 1381 - DNA, 20 bp, Artificial Sequence
  Synthetic construct
gatgcaagtccaggcccaag

SEQ ID NO: 1382 - DNA, 23 bp, Artificial Sequence
  Synthetic construct
agcttgtagtagagcccacaggc

SEQ ID NO: 1383 - DNA, 18 bp, Artificial Sequence
  Synthetic construct
gacccaccaccccatcac

SEQ ID NO: 1384 - DNA, 19 bp, Artificial Sequence
  Synthetic construct
gtccccattggcattcctc

SEQ ID NO: 1385 - DNA, 20 bp, Artificial Sequence
  Synthetic construct
accggcttcggatgcaagtc

SEQ ID NO: 1386 - DNA, 20 bp, Artificial Sequence
  Synthetic construct
tgcagacagggtccccattg

SEQ ID NO: 1387 - DNA, 20 bp, Artificial Sequence
  Synthetic construct
gcccgagtacagctccggac

SEQ ID NO: 1388 - DNA, 27 bp, Artificial Sequence
  Synthetic construct
agtgtggttgtggtggtctgacagttc

SEQ ID NO: 1389 - DNA, 18 bp, Artificial Sequence
  Synthetic construct
tggagcctcctcgtcgac

SEQ ID NO: 1390 - DNA, 20 bp, Artificial Sequence
  Synthetic construct
cacaggacgtccctgctctc

SEQ ID NO: 1391 - DNA, 20 bp, Artificial Sequence
  Synthetic construct
ccgccctacgtgcccgagta

SEQ ID NO: 1392 - DNA, 20 bp, Artificial Sequence
  Synthetic construct
ggcattgcagacagggtccc

SEQ ID NO: 1393 - DNA, 18 bp, Artificial Sequence
  Synthetic construct
agcatgaccgccctgggt

SEQ ID NO: 1394 - DNA, 20 bp, Artificial Sequence
  Synthetic construct
acagggtccccattggcatt

SEQ ID NO: 1395 - DNA, 19 bp, Artificial Sequence
  Synthetic construct
aaggcccggtccagcacag

SEQ ID NO: 1396 - DNA, 21 bp, Artificial Sequence
  Synthetic construct
ggccgggttaaacgagctgtt

SEQ ID NO: 1397 - DNA, 18 bp, Artificial Sequence
  Synthetic construct
cctgggtggagcctcctc

SEQ ID NO: 1398 - DNA, 23 bp, Artificial Sequence
  Synthetic construct
tgccttccttcttcatagtcagg

SEQ ID NO: 1399 - DNA, 18 bp, Artificial Sequence
  Synthetic construct
cccccaccggcttcggat

SEQ ID NO: 1400 - DNA, 24 bp, Artificial Sequence
  Synthetic construct
cgggttaaacgagctgttcttggg

SEQ ID NO: 1401 - DNA, 19 bp, Artificial Sequence
  Synthetic construct
agtcgtcccactcccgtgg

SEQ ID NO: 1402 - DNA, 24 bp, Artificial Sequence
  Synthetic construct
tccttcttcatagtcaggggtctg

SEQ ID NO: 1403 - DNA, 22 bp, Artificial Sequence
  Synthetic construct
aaagagtgcctcaagtaccagg

SEQ ID NO: 1404 - DNA, 20 bp, Artificial Sequence
  Synthetic construct
cttcgcttgggcttaatgag

SEQ ID NO: 1405 - DNA, 20 bp, Artificial Sequence
  Synthetic construct
agcatgaagctggagtcgtc

SEQ ID NO: 1406 - DNA, 20 bp, Artificial Sequence
  Synthetic construct
aggcgttgcacaggtagtgt

SEQ ID NO: 1407 - DNA, 20 bp, Artificial Sequence
  Synthetic construct
atcaccacctacccgcccta

SEQ ID NO: 1408 - DNA, 21 bp, Artificial Sequence
  Synthetic construct
cacagttcacacactccctgc

SEQ ID NO: 1409 - DNA, 19 bp, Artificial Sequence
  Synthetic construct
cttcggatgcaagtccagg

SEQ ID NO: 1410 - DNA, 20 bp, Artificial Sequence
  Synthetic construct
ccggttctgtccgttcattt

SEQ ID NO: 1411 - DNA, 21 bp, Artificial Sequence
  Synthetic construct
agtacagctccggactcttcc

SEQ ID NO: 1412 - DNA, 22 bp, Artificial Sequence
  Synthetic construct
ccgttcattttgtgatagagcc

SEQ ID NO: 1413 - DNA, 20 bp, Artificial Sequence
  Synthetic construct
accaccccatcaccacctac

SEQ ID NO: 1414 - DNA, 19 bp, Artificial Sequence
  Synthetic construct
tagtgtcccgtgccatctc

SEQ ID NO: 1415 - DNA, 20 bp, Artificial Sequence
  Synthetic construct
aagctggagtcgtcccactc

SEQ ID NO: 1416 - DNA, 20 bp, Artificial Sequence
  Synthetic construct
ttgcacaggtagtgtcccgt

SEQ ID NO: 1417 - DNA, 20 bp, Artificial Sequence
  Synthetic construct
ctacgtgcccgagtacagct

SEQ ID NO: 1418 - DNA, 20 bp, Artificial Sequence
  Synthetic construct
gaggttgccccacagttcac

SEQ ID NO: 1419 - DNA, 19 bp, Artificial Sequence
  Synthetic construct
ctcctcgtcgacccaccac

SEQ ID NO: 1420 - DNA, 20 bp, Artificial Sequence
  Synthetic construct
tgccccacagttcacacact

SEQ ID NO: 1421 - DNA, 20 bp, Artificial Sequence
  Synthetic construct
ccgacagcatgaagctggag

SEQ ID NO: 1422 - DNA, 20 bp, Artificial Sequence
  Synthetic construct
cttaatgaggggccggttct

SEQ ID NO: 1423 - DNA, 19 bp, Artificial Sequence
  Synthetic construct
acctacccgccctacgtgc

SEQ ID NO: 1424 - DNA, 18 bp, Artificial Sequence
  Synthetic construct
catctcgccgccacagtg

SEQ ID NO: 1425 - DNA, 18 bp, Artificial Sequence
  Synthetic construct
tggagcctcctcgtcgac

SEQ ID NO: 1426 - DNA, 19 bp, Artificial Sequence
  Synthetic construct
tttgtgatagagcccgcag

SEQ ID NO: 1427 - DNA, 18 bp, Artificial Sequence
  Synthetic construct
gacccaccaccccatcac

SEQ ID NO: 1428 - DNA, 23 bp, Artificial Sequence
  Synthetic construct
gttctgtccgttcattttgtgat

SEQ ID NO: 1429 - DNA, 18 bp, Artificial Sequence
  Synthetic construct
ctcccgtggcagcatgac

SEQ ID NO: 1430 - DNA, 19 bp, Artificial Sequence
  Synthetic construct
acagtggggtcgaggttgc

SEQ ID NO: 1431 - DNA, 20 bp, Artificial Sequence
  Synthetic construct
accggcttcggatgcaagtc

SEQ ID NO: 1432 - DNA, 20 bp, Artificial Sequence
  Synthetic construct
cttgggcttaatgaggggcc

SEQ ID NO: 1433 - DNA, 20 bp, Artificial Sequence
  Synthetic construct
gcccgagtacagctccggac

SEQ ID NO: 1434 - DNA, 20 bp, Artificial Sequence
  Synthetic construct
gggtcgaggttgccccacag

SEQ ID NO: 1435 - DNA, 19 bp, Artificial Sequence
  Synthetic construct
agtcgtcccactcccgtgg

SEQ ID NO: 1436 - DNA, 23 bp, Artificial Sequence
  Synthetic construct
cacaggtagtgtcccgtgccatc

SEQ ID NO: 1437 - DNA, 20 bp, Artificial Sequence
  Synthetic construct
gatgcaagtccaggcccaag

SEQ ID NO: 1438 - DNA, 20 bp, Artificial Sequence
  Synthetic construct
gatagagcccgcaggcgttg

SEQ ID NO: 1439 - DNA, 20 bp, Artificial Sequence
  Synthetic construct
ccgccctacgtgcccgagta

SEQ ID NO: 1440 - DNA, 20 bp, Artificial Sequence
  Synthetic construct
aggggccggttctgtccgtt

SEQ ID NO: 1441 - DNA, 18 bp, Artificial Sequence
  Synthetic construct
agcatgaccgccctgggt

SEQ ID NO: 1442 - DNA, 18 bp, Artificial Sequence
  Synthetic construct
cccgcaggcgttgcacag

SEQ ID NO: 1443 - DNA, 20 bp, Artificial Sequence
  Synthetic construct
cccggcaggacgagaaagag

SEQ ID NO: 1444 - DNA, 19 bp, Artificial Sequence
  Synthetic construct
ccgccacagtggggtcgag

SEQ ID NO: 1445 - DNA, 18 bp, Artificial Sequence
  Synthetic construct
cctgggtggagcctcctc

SEQ ID NO: 1446 - DNA, 20 bp, Artificial Sequence
  Synthetic construct
tccagagtgtggttgtggtg

SEQ ID NO: 1447 - DNA, 19 bp, Artificial Sequence
  Synthetic construct
aaggcccggtccagcacag

SEQ ID NO: 1448 - DNA, 20 bp, Artificial Sequence
  Synthetic construct
acagggtccccattggcatt

SEQ ID NO: 1449 - DNA, 22 bp, Artificial Sequence
  Synthetic construct
gacgagaaagagtgcctcaagt

SEQ ID NO: 1450 - DNA, 18 bp, Artificial Sequence
  Synthetic construct
tgctctcctggctgcaga

SEQ ID NO: 1451 - DNA, 19 bp, Artificial Sequence
  Synthetic construct
cctcaagtaccaggtgccc

SEQ ID NO: 1452 - DNA, 20 bp, Artificial Sequence
  Synthetic construct
cacaggacgtccctgctctc

SEQ ID NO: 1453 - DNA, 18 bp, Artificial Sequence
  Synthetic construct
cccccaccggcttcggat

SEQ ID NO: 1454 - DNA, 20 bp, Artificial Sequence
  Synthetic construct
gagcccacaggcattgcaga

SEQ ID NO: 1455 - DNA, 19 bp, Artificial Sequence
  Synthetic construct
cctgcccgacagcatgaag

SEQ ID NO: 1456 - DNA, 20 bp, Artificial Sequence
  Synthetic construct
ctgacagttcgcacaggacg

SEQ ID NO: 1457 - DNA, 19 bp, Artificial Sequence
  Synthetic construct
gtggcagcatgaccgccct

SEQ ID NO: 1458 - DNA, 20 bp, Artificial Sequence
  Synthetic construct
gacgtccctgctctcctggc

SEQ ID NO: 1459 - DNA, 18 bp, Artificial Sequence
  Synthetic construct
gaccgccctgggtggagc

SEQ ID NO: 1460 - DNA, 20 bp, Artificial Sequence
  Synthetic construct
ccccattggcattcctcctc

SEQ ID NO: 1461 - DNA, 18 bp, Artificial Sequence
  Synthetic construct
gtgcccctgcccgacagc

SEQ ID NO: 1462 - DNA, 22 bp, Artificial Sequence
  Synthetic construct
cagttcgcacaggacgtccctg

SEQ ID NO: 1463 - DNA, 18 bp, Artificial Sequence
  Synthetic construct
ggacccatcgctgtccac

SEQ ID NO: 1464 - DNA, 20 bp, Artificial Sequence
  Synthetic construct
tgtggtggtctgacagttcg

SEQ ID NO: 1465 - DNA, 18 bp, Artificial Sequence
  Synthetic construct
tgtccaccccaggctcgg

SEQ ID NO: 1466 - DNA, 23 bp, Artificial Sequence
  Synthetic construct
ggtggtctgacagttcgcacagg

SEQ ID NO: 1467 - DNA, 18 bp, Artificial Sequence
  Synthetic construct
atcgctgtccaccccagg

SEQ ID NO: 1468 - DNA, 20 bp, Artificial Sequence
  Synthetic construct
gtgtggttgtggtggtctga

SEQ ID NO: 1469 - DNA, 19 bp, Artificial Sequence
  Synthetic construct
aggtccagccagagcccaa

SEQ ID NO: 1470 - DNA, 20 bp, Artificial Sequence
  Synthetic construct
actcgtcccaccacctctag

SEQ ID NO: 1471 - DNA, 20 bp, Artificial Sequence
  Synthetic construct
agagtgacccctcgacctgt

SEQ ID NO: 1472 - DNA, 20 bp, Artificial Sequence
  Synthetic construct
tgccagagtaacgtcagcac

SEQ ID NO: 1473 - DNA, 19 bp, Artificial Sequence
  Synthetic construct
gagccagagtgacccctcg

SEQ ID NO: 1474 - DNA, 22 bp, Artificial Sequence
  Synthetic construct
agagtaacgtcagcacaggctt

SEQ ID NO: 1475 - DNA, 20 bp, Artificial Sequence
  Synthetic construct
ccctcgacctgtcagccatg

SEQ ID NO: 1476 - DNA, 24 bp, Artificial Sequence
  Synthetic construct
taacgtcagcacaggctttcctgg

SEQ ID NO: 1477 - DNA, 20 bp, Artificial Sequence
  Synthetic construct
agatggagcaactgcgtcag

SEQ ID NO: 1478 - DNA, 20 bp, Artificial Sequence
  Synthetic construct
actcgtcccaccacctctag

SEQ ID NO: 1479 - DNA, 20 bp, Artificial Sequence
  Synthetic construct
cagctcaagaagcagattgc

SEQ ID NO: 1480 - DNA, 20 bp, Artificial Sequence
  Synthetic construct
gtgcatggcgtaaatcttgg

SEQ ID NO: 1481 - DNA, 18 bp, Artificial Sequence
  Synthetic construct
tcaggaagcggagcagct

SEQ ID NO: 1482 - DNA, 20 bp, Artificial Sequence
  Synthetic construct
taaatcttggccaggtgtcc

SEQ ID NO: 1483 - DNA, 18 bp, Artificial Sequence
  Synthetic construct
caactgcgtcaggaagcg

SEQ ID NO: 1484 - DNA, 20 bp, Artificial Sequence
  Synthetic construct
caggtgtccccttaacgtcc

SEQ ID NO: 1485 - DNA, 20 bp, Artificial Sequence
  Synthetic construct
atgggggagatggagcaact

SEQ ID NO: 1486 - DNA, 19 bp, Artificial Sequence
  Synthetic construct
gtccgcatctggactcgtc

SEQ ID NO: 1487 - DNA, 20 bp, Artificial Sequence
  Synthetic construct
aagcggagcagctcaagaag

SEQ ID NO: 1488 - DNA, 20 bp, Artificial Sequence
  Synthetic construct
tagaatcagtggcccagtgc

SEQ ID NO: 1489 - DNA, 18 bp, Artificial Sequence
  Synthetic construct
tcagccatgggggagatg

SEQ ID NO: 1490 - DNA, 21 bp, Artificial Sequence
  Synthetic construct
accacctctaggccagacacc

SEQ ID NO: 1491 - DNA, 24 bp, Artificial Sequence
  Synthetic construct
gcggagcagctcaagaagcagatt

SEQ ID NO: 1492 - DNA, 21 bp, Artificial Sequence
  Synthetic construct
ggcccagtgcatggcgtaaat

SEQ ID NO: 1493 - DNA, 20 bp, Artificial Sequence
  Synthetic construct
ctgcgtcaggaagcggagca

SEQ ID NO: 1494 - DNA, 22 bp, Artificial Sequence
  Synthetic construct
tcttggccaggtgtccccttaa

SEQ ID NO: 1495 - DNA, 20 bp, Artificial Sequence
  Synthetic construct
acctgtcagccatgggggag

SEQ ID NO: 1496 - DNA, 20 bp, Artificial Sequence
  Synthetic construct
gcatctggactcgtcccacc

SEQ ID NO: 1497 - DNA, 19 bp, Artificial Sequence
  Synthetic construct
aggtccagccagagcccaa

SEQ ID NO: 1498 - DNA, 24 bp, Artificial Sequence
  Synthetic construct
atctggactcgtcccaccacctct

SEQ ID NO: 1499 - DNA, 18 bp, Artificial Sequence
  Synthetic construct
accggagctggaaacccg

SEQ ID NO: 1500 - DNA, 19 bp, Artificial Sequence
  Synthetic construct
cttaacgtccgccgcgtcc

SEQ ID NO: 1501 - DNA, 20 bp, Artificial Sequence
  Synthetic construct
caggaaccggagctggaaac

SEQ ID NO: 1502 - DNA, 20 bp, Artificial Sequence
  Synthetic construct
tggcgtaaatcttggccagg

SEQ ID NO: 1503 - DNA, 18 bp, Artificial Sequence
  Synthetic construct
cccagccatcactcttcc

SEQ ID NO: 1504 - DNA, 20 bp, Artificial Sequence
  Synthetic construct
gagatgccctcctcttcctc

SEQ ID NO: 1505 - DNA, 18 bp, Artificial Sequence
  Synthetic construct
tttgcttccctttggtcg

SEQ ID NO: 1506 - DNA, 22 bp, Artificial Sequence
  Synthetic construct
aagggaagatgagtgagtcgag

SEQ ID NO: 1507 - DNA, 21 bp, Artificial Sequence
  Synthetic construct
ctcttaggtgttggcacttcg

SEQ ID NO: 1508 - DNA, 22 bp, Artificial Sequence
  Synthetic construct
tcttccacctgctccttagaga

SEQ ID NO: 1509 - DNA, 20 bp, Artificial Sequence
  Synthetic construct
acccttgtttttgcttccct

SEQ ID NO: 1510 - DNA, 20 bp, Artificial Sequence
  Synthetic construct
ccatcactcttccacctgct

SEQ ID NO: 1511 - DNA, 21 bp, Artificial Sequence
  Synthetic construct
cccgaggtctcttaggtgttg

SEQ ID NO: 1512 - DNA, 21 bp, Artificial Sequence
  Synthetic construct
agtgagtcgagctcgaagtcc

SEQ ID NO: 1513 - DNA, 23 bp, Artificial Sequence
  Synthetic construct
cttgtttttgcttccctttggtc

SEQ ID NO: 1514 - DNA, 23 bp, Artificial Sequence
  Synthetic construct
aagatgagtgagtcgagctcgaa

SEQ ID NO: 1515 - DNA, 19 bp, Artificial Sequence
  Synthetic construct
gtgttggcacttcgctggg

SEQ ID NO: 1516 - DNA, 23 bp, Artificial Sequence
  Synthetic construct
cacctgctccttagagaagggaa

SEQ ID NO: 1517 - DNA, 20 bp, Artificial Sequence
  Synthetic construct
gtcggccccgaggtctctta

SEQ ID NO: 1518 - DNA, 21 bp, Artificial Sequence
  Synthetic construct
ctcgaagtccagccagccctt

SEQ ID NO: 1519 - DNA, 27 bp, Artificial Sequence
  Synthetic construct
ccgaggtctcttaggtgttggcacttc

SEQ ID NO: 1520 - DNA, 24 bp, Artificial Sequence
  Synthetic construct
atcccagccatcactcttccacct

SEQ ID NO: 1521 - DNA, 19 bp, Artificial Sequence
  Synthetic construct
ctttggtcggccccgaggt

SEQ ID NO: 1522 - DNA, 18 bp, Artificial Sequence
  Synthetic construct
tggcctccaagcaggaaa

SEQ ID NO: 1523 - DNA, 20 bp, Artificial Sequence
  Synthetic construct
gagatgccctcctcttcctc

SEQ ID NO: 1524 - DNA, 24 bp, Artificial Sequence
  Synthetic construct
tccttagagaagggaagatgagtg

SEQ ID NO: 1525 - DNA, 20 bp, Artificial Sequence
  Synthetic construct
tgtccagtcccagaaggaag

SEQ ID NO: 1526 - DNA, 20 bp, Artificial Sequence
  Synthetic construct
aaaggacggcactgagaagc

SEQ ID NO: 1527 - DNA, 19 bp, Artificial Sequence
  Synthetic construct
gaggactcctgcgagatgc

SEQ ID NO: 1528 - DNA, 19 bp, Artificial Sequence
  Synthetic construct
tccaagcaggaaaaggacg

SEQ ID NO: 1529 - DNA, 18 bp, Artificial Sequence
  Synthetic construct
gagcggagcaaagctgtc

SEQ ID NO: 1530 - DNA, 18 bp, Artificial Sequence
  Synthetic construct
cagcccttggcctccaag

SEQ ID NO: 1531 - DNA, 20 bp, Artificial Sequence
  Synthetic construct
atgggtcactgctcctcctc

SEQ ID NO: 1532 - DNA, 20 bp, Artificial Sequence
  Synthetic construct
caggaaaaggacggcactga

SEQ ID NO: 1533 - DNA, 20 bp, Artificial Sequence
  Synthetic construct
gtcccagaaggaagctgctc

SEQ ID NO: 1534 - DNA, 19 bp, Artificial Sequence
  Synthetic construct
tccagccagcccttggcct

SEQ ID NO: 1535 - DNA, 20 bp, Artificial Sequence
  Synthetic construct
tcctgcgagatgccctcctc

SEQ ID NO: 1536 - DNA, 18 bp, Artificial Sequence
  Synthetic construct
ggcactgagaagcggggc

SEQ ID NO: 1537 - DNA, 19 bp, Artificial Sequence
  Synthetic construct
agtgaggagcaggcggcac

SEQ ID NO: 1538 - DNA, 19 bp, Artificial Sequence
  Synthetic construct
ctggcgcggctccaagaag

SEQ ID NO: 1539 - DNA, 20 bp, Artificial Sequence
  Synthetic construct
cctccgaggactcctgcgag

SEQ ID NO: 1540 - DNA, 20 bp, Artificial Sequence
  Synthetic construct
tctaattgggactccgagcc

SEQ ID NO: 1541 - DNA, 20 bp, Artificial Sequence
  Synthetic construct
tcttggcagcacccttgttt

SEQ ID NO: 1542 - DNA, 18 bp, Artificial Sequence
  Synthetic construct
gctatttctggcgctggc

SEQ ID NO: 1543 - DNA, 20 bp, Artificial Sequence
  Synthetic construct
gcagcacccttgtttttgct

SEQ ID NO: 1544 - DNA, 20 bp, Artificial Sequence
  Synthetic construct
ccggggctatttctggcgct

SEQ ID NO: 1545 - DNA, 18 bp, Artificial Sequence
  Synthetic construct
ccgggtcttggcagcacc

SEQ ID NO: 1546 - DNA, 18 bp, Artificial Sequence
  Synthetic construct
gtcctcagcgcccagcac

SEQ ID NO: 1547 - DNA, 20 bp, Artificial Sequence
  Synthetic construct
tcactgctcctcctccgagg

SEQ ID NO: 1548 - DNA, 19 bp, Artificial Sequence
  Synthetic construct
atccgcatttgctaccagc

SEQ ID NO: 1549 - DNA, 20 bp, Artificial Sequence
  Synthetic construct
ctcctcctccgaggactcct

SEQ ID NO: 1550 - DNA, 18 bp, Artificial Sequence
  Synthetic construct
agccaggccggtcctcag

SEQ ID NO: 1551 - DNA, 19 bp, Artificial Sequence
  Synthetic construct
cacgcatgggtcactgctc

SEQ ID NO: 1552 - DNA, 19 bp, Artificial Sequence
  Synthetic construct
catttgctaccagcggcgg

SEQ ID NO: 1553 - DNA, 18 bp, Artificial Sequence
  Synthetic construct
gagcaggcggcacgcatg

SEQ ID NO: 1554 - DNA, 20 bp, Artificial Sequence
  Synthetic construct
gctcctctaattgggactcc

SEQ ID NO: 1555 - DNA, 20 bp, Artificial Sequence
  Synthetic construct
tcctggagttgtggtggttt

SEQ ID NO: 1556 - DNA, 20 bp, Artificial Sequence
  Synthetic construct
actccgagccggggctattt

SEQ ID NO: 1557 - DNA, 20 bp, Artificial Sequence
  Synthetic construct
tctgccccttggtttccttc

SEQ ID NO: 1558 - DNA, 19 bp, Artificial Sequence
  Synthetic construct
ttttaagctcccctgagcc

SEQ ID NO: 1559 - DNA, 20 bp, Artificial Sequence
  Synthetic construct
tttccttcctggagttgtgg

SEQ ID NO: 1560 - DNA, 19 bp, Artificial Sequence
  Synthetic construct
ctcccctgagccggtgctg

SEQ ID NO: 1561 - DNA, 27 bp, Artificial Sequence
  Synthetic construct
gtttccttcctggagttgtggtggttt

SEQ ID NO: 1562 - DNA, 20 bp, Artificial Sequence
  Synthetic construct
gtgctgcgctcctctaattg

SEQ ID NO: 1563 - DNA, 20 bp, Artificial Sequence
  Synthetic construct
ccttggtttccttcctggag

SEQ ID NO: 1564 - DNA, 18 bp, Artificial Sequence
  Synthetic construct
agccggtgctgcgctcct

SEQ ID NO: 1565 - DNA, 20 bp, Artificial Sequence
  Synthetic construct
tttgggtctgccccttggtt

SEQ ID NO: 1566 - DNA, 21 bp, Artificial Sequence
  Synthetic construct
tgggtcgctctttttaagctc

SEQ ID NO: 1567 - DNA, 19 bp, Artificial Sequence
  Synthetic construct
tcctccagtgaggagcagg

SEQ ID NO: 1568 - DNA, 20 bp, Artificial Sequence
  Synthetic construct
gctctttttaagctcccctg

SEQ ID NO: 1569 - DNA, 19 bp, Artificial Sequence
  Synthetic construct
agctgctcctccagtgagg

SEQ ID NO: 1570 - DNA, 19 bp, Artificial Sequence
  Synthetic construct
gcccctgggtcgctctttt

SEQ ID NO: 1571 - DNA, 22 bp, Artificial Sequence
  Synthetic construct
cagaaggaagctgctcctccag

SEQ ID NO: 1572 - DNA, 19 bp, Artificial Sequence
  Synthetic construct
tccagccagcccttggcct

SEQ ID NO: 1573 - DNA, 19 bp, Artificial Sequence
  Synthetic construct
cttccctttggtcggcccc

SEQ ID NO: 1574 - DNA, 20 bp, Artificial Sequence
  Synthetic construct
tcgagctcgaagtccagcca

SEQ ID NO: 1575 - DNA, 19 bp, Artificial Sequence
  Synthetic construct
cacgcatgggtcactgctc

SEQ ID NO: 1576 - DNA, 20 bp, Artificial Sequence
  Synthetic construct
agcccttggcctccaagcag

SEQ ID NO: 1577 - DNA, 20 bp, Artificial Sequence
  Synthetic construct
tcctgcgagatgccctcctc

SEQ ID NO: 1578 - DNA, 19 bp, Artificial Sequence
  Synthetic construct
ctggcgcggctccaagaag

SEQ ID NO: 1579 - DNA, 20 bp, Artificial Sequence
  Synthetic construct
tgctcctcctccgaggactc

SEQ ID NO: 1580 - DNA, 20 bp, Artificial Sequence
  Synthetic construct
gtgctgcgctcctctaattg

SEQ ID NO: 1581 - DNA, 20 bp, Artificial Sequence
  Synthetic construct
gcagcacccttgtttttgct

SEQ ID NO: 1582 - DNA, 18 bp, Artificial Sequence
  Synthetic construct
agccaggccggtcctcag

SEQ ID NO: 1583 - DNA, 19 bp, Artificial Sequence
  Synthetic construct
ggtcactgctcctcctccg

SEQ ID NO: 1584 - DNA, 20 bp, Artificial Sequence
  Synthetic construct
actccgagccggggctattt

SEQ ID NO: 1585 - DNA, 18 bp, Artificial Sequence
  Synthetic construct
ccgggtcttggcagcacc

SEQ ID NO: 1586 - DNA, 18 bp, Artificial Sequence
  Synthetic construct
gtcctcagcgcccagcac

SEQ ID NO: 1587 - DNA, 22 bp, Artificial Sequence
  Synthetic construct
cagaaggaagctgctcctccag

SEQ ID NO: 1588 - DNA, 18 bp, Artificial Sequence
  Synthetic construct
gccggggctatttctggc

SEQ ID NO: 1589 - DNA, 19 bp, Artificial Sequence
  Synthetic construct
tcctccagtgaggagcagg

SEQ ID NO: 1590 - DNA, 21 bp, Artificial Sequence
  Synthetic construct
tgggtcgctctttttaagctc

SEQ ID NO: 1591 - DNA, 20 bp, Artificial Sequence
  Synthetic construct
ccttggtttccttcctggag

SEQ ID NO: 1592 - DNA, 19 bp, Artificial Sequence
  Synthetic construct
gcccctgggtcgctctttt

SEQ ID NO: 1593 - DNA, 20 bp, Artificial Sequence
  Synthetic construct
tctgccccttggtttccttc

SEQ ID NO: 1594 - DNA, 20 bp, Artificial Sequence
  Synthetic construct
gctctttttaagctcccctg

SEQ ID NO: 1595 - DNA, 20 bp, Artificial Sequence
  Synthetic construct
aagctgctcctccagtgagg

SEQ ID NO: 1596 - DNA, 20 bp, Artificial Sequence
  Synthetic construct
ccatcactcttccacctgct

SEQ ID NO: 1597 - DNA, 20 bp, Artificial Sequence
  Synthetic construct
atgggtcactgctcctcctc

SEQ ID NO: 1598 - DNA, 22 bp, Artificial Sequence
  Synthetic construct
tcttccacctgctccttagaga

SEQ ID NO: 1599 - DNA, 20 bp, Artificial Sequence
  Synthetic construct
aagctgctcctccagtgagg

SEQ ID NO: 1600 - DNA, 22 bp, Artificial Sequence
  Synthetic construct
aagggaagatgagtgagtcgag

SEQ ID NO: 1601 - DNA, 19 bp, Artificial Sequence
  Synthetic construct
tcctccagtgaggagcagg

SEQ ID NO: 1602 - DNA, 18 bp, Artificial Sequence
  Synthetic construct
cccagccatcactcttcc

SEQ ID NO: 1603 - DNA, 20 bp, Artificial Sequence
  Synthetic construct
ctcctcctccgaggactcct

SEQ ID NO: 1604 - DNA, 24 bp, Artificial Sequence
  Synthetic construct
atcccagccatcactcttccacct

SEQ ID NO: 1605 - DNA, 20 bp, Artificial Sequence
  Synthetic construct
tcactgctcctcctccgagg

SEQ ID NO: 1606 - DNA, 23 bp, Artificial Sequence
  Synthetic construct
cacctgctccttagagaagggaa

SEQ ID NO: 1607 - DNA, 22 bp, Artificial Sequence
  Synthetic construct
cagaaggaagctgctcctccag

SEQ ID NO: 1608 - DNA, 21 bp, Artificial Sequence
  Synthetic construct
agtgagtcgagctcgaagtcc

SEQ ID NO: 1609 - DNA, 19 bp, Artificial Sequence
  Synthetic construct
cacgcatgggtcactgctc

SEQ ID NO: 1610 - DNA, 20 bp, Artificial Sequence
  Synthetic construct
agcccttggcctccaagcag

SEQ ID NO: 1611 - DNA, 18 bp, Artificial Sequence
  Synthetic construct
gagcaggcggcacgcatg

SEQ ID NO: 1612 - DNA, 23 bp, Artificial Sequence
  Synthetic construct
aagatgagtgagtcgagctcgaa

SEQ ID NO: 1613 - DNA, 19 bp, Artificial Sequence
  Synthetic construct
agcaaagctgtccagtccc

SEQ ID NO: 1614 - DNA, 19 bp, Artificial Sequence
  Synthetic construct
agcgctggtagggagtcag

SEQ ID NO: 1615 - DNA, 21 bp, Artificial Sequence
  Synthetic construct
ctggtgtgctgtgtagtgtgg

SEQ ID NO: 1616 - DNA, 19 bp, Artificial Sequence
  Synthetic construct
aagcagcctccggtgagtc

SEQ ID NO: 1617 - DNA, 21 bp, Artificial Sequence
  Synthetic construct
tgtgtagtgtggtggtgaggg

SEQ ID NO: 1618 - DNA, 20 bp, Artificial Sequence
  Synthetic construct
tcgaagtccagccagccctt

SEQ ID NO: 1619 - DNA, 23 bp, Artificial Sequence
  Synthetic construct
caaagctgtccagtcccagaagg

SEQ ID NO: 1620 - DNA, 18 bp, Artificial Sequence
  Synthetic construct
ctccggtgagtcccggga

SEQ ID NO: 1621 - DNA, 24 bp, Artificial Sequence
  Synthetic construct
gtgtgctgtgtagtgtggtggtga

SEQ ID NO: 1622 - DNA, 20 bp, Artificial Sequence
  Synthetic construct
gggacagcgctggtagggag

SEQ ID NO: 1623 - DNA, 21 bp, Artificial Sequence
  Synthetic construct
gtgagggcacaggtggaagat

SEQ ID NO: 1624 - DNA, 21 bp, Artificial Sequence
  Synthetic construct
cgaagtgccaacacctaagag

SEQ ID NO: 1625 - DNA, 20 bp, Artificial Sequence
  Synthetic construct
tgtccagtcccagaaggaag

SEQ ID NO: 1626 - DNA, 21 bp, Artificial Sequence
  Synthetic construct
ccaacacctaagagacctcgg

SEQ ID NO: 1627 - DNA, 20 bp, Artificial Sequence
  Synthetic construct
aagctgctcctccagtgagg

SEQ ID NO: 1628 - DNA, 18 bp, Artificial Sequence
  Synthetic construct
cgaccaaagggaagcaaa

SEQ ID NO: 1629 - DNA, 18 bp, Artificial Sequence
  Synthetic construct
gagcggagcaaagctgtc

SEQ ID NO: 1630 - DNA, 20 bp, Artificial Sequence
  Synthetic construct
aagggaagcaaaaacaaggg

SEQ ID NO: 1631 - DNA, 19 bp, Artificial Sequence
  Synthetic construct
agcaaagctgtccagtccc

SEQ ID NO: 1632 - DNA, 19 bp, Artificial Sequence
  Synthetic construct
cccagcgaagtgccaacac

SEQ ID NO: 1633 - DNA, 23 bp, Artificial Sequence
  Synthetic construct
caaagctgtccagtcccagaagg

SEQ ID NO: 1634 - DNA, 20 bp, Artificial Sequence
  Synthetic construct
cctaagagacctcggggccg

SEQ ID NO: 1635 - DNA, 19 bp, Artificial Sequence
  Synthetic construct
agtgaggagcaggcggcac

SEQ ID NO: 1636 - DNA, 19 bp, Artificial Sequence
  Synthetic construct
ggggccgaccaaagggaag

SEQ ID NO: 1637 - DNA, 22 bp, Artificial Sequence
  Synthetic construct
cagaaggaagctgctcctccag

SEQ ID NO: 1638 - DNA, 20 bp, Artificial Sequence
  Synthetic construct
tcgaagtccagccagccctt

SEQ ID NO: 1639 - DNA, 20 bp, Artificial Sequence
  Synthetic construct
cctccgaggactcctgcgag

SEQ ID NO: 1640 - DNA, 18 bp, Artificial Sequence
  Synthetic construct
agccaggccggtcctcag

SEQ ID NO: 1641 - DNA, 20 bp, Artificial Sequence
  Synthetic construct
ggtgggagcggagcaaagct

SEQ ID NO: 1642 - DNA, 18 bp, Artificial Sequence
  Synthetic construct
gtcctcagcgcccagcac

SEQ ID NO: 1643 - DNA, 18 bp, Artificial Sequence
  Synthetic construct
atggtgggcctggggaag

SEQ ID NO: 1644 - DNA, 18 bp, Artificial Sequence
  Synthetic construct
tttgctaccagcggcggc

SEQ ID NO: 1645 - DNA, 18 bp, Artificial Sequence
  Synthetic construct
ctggggaaggggtggggg

SEQ ID NO: 1646 - DNA, 20 bp, Artificial Sequence
  Synthetic construct
cgagctcgaagtccagccag

SEQ ID NO: 1647 - DNA, 20 bp, Artificial Sequence
  Synthetic construct
ggtgggagcggagcaaagct

SEQ ID NO: 1648 - DNA, 18 bp, Artificial Sequence
  Synthetic construct
agccaggccggtcctcag

SEQ ID NO: 1649 - DNA, 18 bp, Artificial Sequence
  Synthetic construct
ctggggaaggggtggggg

SEQ ID NO: 1650 - DNA, 20 bp, Artificial Sequence
  Synthetic construct
agcccttggcctccaagcag

SEQ ID NO: 1651 - DNA, 27 bp, Artificial Sequence
  Synthetic construct
ccgaggtctcttaggtgttggcacttc

SEQ ID NO: 1652 - DNA, 20 bp, Artificial Sequence
  Synthetic construct
tggcctccaagcaggaaaag

SEQ ID NO: 1653 - DNA, 20 bp, Artificial Sequence
  Synthetic construct
aagctgctcctccagtgagg

SEQ ID NO: 1654 - DNA, 18 bp, Artificial Sequence
  Synthetic construct
agccaggccggtcctcag

SEQ ID NO: 1655 - DNA, 20 bp, Artificial Sequence
  Synthetic construct
ctgcgagatgccctcctctt

SEQ ID NO: 1656 - DNA, 19 bp, Artificial Sequence
  Synthetic construct
ctggcgcggctccaagaag

SEQ ID NO: 1657 - DNA, 20 bp, Artificial Sequence
  Synthetic construct
tttgggtctgccccttggtt

SEQ ID NO: 1658 - DNA, 19 bp, Artificial Sequence
  Synthetic construct
ctcccctgagccggtgctg

SEQ ID NO: 1659 - DNA, 20 bp, Artificial Sequence
  Synthetic construct
ggtcactgctcctcctccga

SEQ ID NO: 1660 - DNA, 18 bp, Artificial Sequence
  Synthetic construct
agccggtgctgcgctcct

SEQ ID NO: 1661 - DNA, 24 bp, Artificial Sequence
  Synthetic construct
tcactgctcctcctccgaggactc

SEQ ID NO: 1662 - DNA, 21 bp, Artificial Sequence
  Synthetic construct
cggtgctgcgctcctctaatt

SEQ ID NO: 1663 - DNA, 18 bp, Artificial Sequence
  Synthetic construct
cggcacgcatgggtcact

SEQ ID NO: 1664 - DNA, 24 bp, Artificial Sequence
  Synthetic construct
tgctgcgctcctctaattgggact

SEQ ID NO: 1665 - DNA, 27 bp, Artificial Sequence
  Synthetic construct
gtttccttcctggagttgtggtggttt

SEQ ID NO: 1666 - DNA, 20 bp, Artificial Sequence
  Synthetic construct
gctctttttaagctcccctg

SEQ ID NO: 1667 - DNA, 20 bp, Artificial Sequence
  Synthetic construct
ccttggtttccttcctggag

SEQ ID NO: 1668 - DNA, 20 bp, Artificial Sequence
  Synthetic construct
ggtttcagatccgcatttgc

SEQ ID NO: 1669 - DNA, 22 bp, Artificial Sequence
  Synthetic construct
cagaaggaagctgctcctccag

SEQ ID NO: 1670 - DNA, 20 bp, Artificial Sequence
  Synthetic construct
tctctcccggtttcagatcc

SEQ ID NO: 1671 - DNA, 19 bp, Artificial Sequence
  Synthetic construct
agcaaagctgtccagtccc

SEQ ID NO: 1672 - DNA, 24 bp, Artificial Sequence
  Synthetic construct
tttcagatccgcatttgctaccag

SEQ ID NO: 1673 - DNA, 23 bp, Artificial Sequence
  Synthetic construct
caaagctgtccagtcccagaagg

SEQ ID NO: 1674 - DNA, 24 bp, Artificial Sequence
  Synthetic construct
tccttagagaagggaagatgagtg

SEQ ID NO: 1675 - DNA, 18 bp, Artificial Sequence
  Synthetic construct
cacttcgctgggctcctt

SEQ ID NO: 1676 - DNA, 20 bp, Artificial Sequence
  Synthetic construct
cgagctcgaagtccagccag

SEQ ID NO: 1677 - DNA, 20 bp, Artificial Sequence
  Synthetic construct
ggtcactgctcctcctccga

SEQ ID NO: 1678 - DNA, 19 bp, Artificial Sequence
  Synthetic construct
ctggcgcggctccaagaag

SEQ ID NO: 1679 - DNA, 21 bp, Artificial Sequence
  Synthetic construct
cctgcgagatgccctcctctt

SEQ ID NO: 1680 - DNA, 18 bp, Artificial Sequence
  Synthetic construct
gccggggctatttctggc

SEQ ID NO: 1681 - DNA, 20 bp, Artificial Sequence
  Synthetic construct
agatgccctcctcttcctcc

SEQ ID NO: 1682 - DNA, 18 bp, Artificial Sequence
  Synthetic construct
tttgctaccagcggcggc

SEQ ID NO: 1683 - DNA, 18 bp, Artificial Sequence
  Synthetic construct
gagcaggcggcacgcatg

SEQ ID NO: 1684 - DNA, 20 bp, Artificial Sequence
  Synthetic construct
gctcctctaattgggactcc

SEQ ID NO: 1685 - DNA, 20 bp, Artificial Sequence
  Synthetic construct
gcagcacccttgtttttgct

SEQ ID NO: 1686 - DNA, 21 bp, Artificial Sequence
  Synthetic construct
tgggtcgctctttttaagctc

SEQ ID NO: 1687 - DNA, 20 bp, Artificial Sequence
  Synthetic construct
tcctggagttgtggtggttt

SEQ ID NO: 1688 - DNA, 19 bp, Artificial Sequence
  Synthetic construct
atccgcatttgctaccagc

SEQ ID NO: 1689 - DNA, 20 bp, Artificial Sequence
  Synthetic construct
ccttggtttccttcctggag

SEQ ID NO: 1690 - DNA, 20 bp, Artificial Sequence
  Synthetic construct
gtgctgcgctcctctaattg

SEQ ID NO: 1691 - DNA, 20 bp, Artificial Sequence
  Synthetic construct
tctgccccttggtttccttc

SEQ ID NO: 1692 - DNA, 20 bp, Artificial Sequence
  Synthetic construct
gctctttttaagctcccctg

SEQ ID NO: 1693 - DNA, 19 bp, Artificial Sequence
  Synthetic construct
tcctccagtgaggagcagg

SEQ ID NO: 1694 - DNA, 19 bp, Artificial Sequence
  Synthetic construct
gcccctgggtcgctctttt

SEQ ID NO: 1695 - DNA, 20 bp, Artificial Sequence
  Synthetic construct
agctgtccagtcccagaagg

SEQ ID NO: 1696 - DNA, 18 bp, Artificial Sequence
  Synthetic construct
gtcctcagcgcccagcac

SEQ ID NO: 1697 - DNA, 20 bp, Artificial Sequence
  Synthetic construct
agatgccctcctcttcctcc

SEQ ID NO: 1698 - DNA, 19 bp, Artificial Sequence
  Synthetic construct
ctggcgcggctccaagaag

SEQ ID NO: 1699 - DNA, 24 bp, Artificial Sequence
  Synthetic construct
tcactgctcctcctccgaggactc

SEQ ID NO: 1700 - DNA, 18 bp, Artificial Sequence
  Synthetic construct
gccggggctatttctggc

SEQ ID NO: 1701 - DNA, 20 bp, Artificial Sequence
  Synthetic construct
tctgccccttggtttccttc

SEQ ID NO: 1702 - DNA, 21 bp, Artificial Sequence
  Synthetic construct
tttcagatccgcatttgctac

SEQ ID NO: 1703 - DNA, 20 bp, Artificial Sequence
  Synthetic construct
gaaggaagctgctcctccag

SEQ ID NO: 1704 - DNA, 24 bp, Artificial Sequence
  Synthetic construct
atcccagccatcactcttccacct

SEQ ID NO: 1705 - DNA, 20 bp, Artificial Sequence
  Synthetic construct
cctccgaggactcctgcgag

SEQ ID NO: 1706 - DNA, 18 bp, Artificial Sequence
  Synthetic construct
gtcctcagcgcccagcac

SEQ ID NO: 1707 - DNA, 18 bp, Artificial Sequence
  Synthetic construct
ctggggaaggggtggggg

SEQ ID NO: 1708 - DNA, 19 bp, Artificial Sequence
  Synthetic construct
atccgcatttgctaccagc

SEQ ID NO: 1709 - DNA, 19 bp, Artificial Sequence
  Synthetic construct
tcctccagtgaggagcagg

SEQ ID NO: 1710 - DNA, 20 bp, Artificial Sequence
  Synthetic construct
gctctttttaagctcccctg

SEQ ID NO: 1711 - DNA, 19 bp, Artificial Sequence
  Synthetic construct
agcaaagctgtccagtccc

SEQ ID NO: 1712 - DNA, 20 bp, Artificial Sequence
  Synthetic construct
gggtttagccctagccgcta

SEQ ID NO: 1713 - DNA, 23 bp, Artificial Sequence
  Synthetic construct
caaagctgtccagtcccagaagg

SEQ ID NO: 1714 - DNA, 20 bp, Artificial Sequence
  Synthetic construct
gcctcgggggtttagcccta

SEQ ID NO: 1715 - DNA, 20 bp, Artificial Sequence
  Synthetic construct
ggtgggagcggagcaaagct

SEQ ID NO: 1716 - DNA, 18 bp, Artificial Sequence
  Synthetic construct
ctggagcctgatgcctcg

SEQ ID NO: 1717 - DNA, 18 bp, Artificial Sequence
  Synthetic construct
atggtgggcctggggaag

SEQ ID NO: 1718 - DNA, 20 bp, Artificial Sequence
  Synthetic construct
cctgatgcctcgggggttta

SEQ ID NO: 1719 - DNA, 18 bp, Artificial Sequence
  Synthetic construct
ctggggaaggggtggggg

SEQ ID NO: 1720 - DNA, 18 bp, Artificial Sequence
  Synthetic construct
cgggtctggagcctgatg

SEQ ID NO: 1721 - DNA, 18 bp, Artificial Sequence
  Synthetic construct
ggtggtgatggtgggcct

SEQ ID NO: 1722 - DNA, 20 bp, Artificial Sequence
  Synthetic construct
atcactcttccacctgctcc

SEQ ID NO: 1723 - DNA, 21 bp, Artificial Sequence
  Synthetic construct
tgtgtagtgtggtggtgaggg

SEQ ID NO: 1724 - DNA, 20 bp, Artificial Sequence
  Synthetic construct
tcagagaagcattcgaccct

SEQ ID NO: 1725 - DNA, 19 bp, Artificial Sequence
  Synthetic construct
ttgtcatccacccacctca

SEQ ID NO: 1726 - DNA, 20 bp, Artificial Sequence
  Synthetic construct
tcagagaagcattcgaccct

SEQ ID NO: 1727 - DNA, 22 bp, Artificial Sequence
  Synthetic construct
cttgttcaaaagcactgctcac

SEQ ID NO: 1728 - DNA, 20 bp, Artificial Sequence
  Synthetic construct
aagcattcgaccctggtgaa

SEQ ID NO: 1729 - DNA, 22 bp, Artificial Sequence
  Synthetic construct
aaagcactgctcacattgtcag

SEQ ID NO: 1730 - DNA, 20 bp, Artificial Sequence
  Synthetic construct
ttcgaccctggtgaatgatg

SEQ ID NO: 1731 - DNA, 25 bp, Artificial Sequence
  Synthetic construct
cactgctcacattgtcagtaaattc

SEQ ID NO: 1732 - DNA, 22 bp, Artificial Sequence
  Synthetic construct
cctgagcagaggactgtacctt

SEQ ID NO: 1733 - DNA, 19 bp, Artificial Sequence
  Synthetic construct
ttgtcatccacccacctca

SEQ ID NO: 1734 - DNA, 20 bp, Artificial Sequence
  Synthetic construct
gcctataagaccctcctggc

SEQ ID NO: 1735 - DNA, 23 bp, Artificial Sequence
  Synthetic construct
aaatttccttggcttcttcaaag

SEQ ID NO: 1736 - DNA, 23 bp, Artificial Sequence
  Synthetic construct
gaatgatgcctataagaccctcc

SEQ ID NO: 1737 - DNA, 22 bp, Artificial Sequence
  Synthetic construct
gtgcccagcaagaactttattt

SEQ ID NO: 1738 - DNA, 20 bp, Artificial Sequence
  Synthetic construct
atacagcgaagctccagcac

SEQ ID NO: 1739 - DNA, 23 bp, Artificial Sequence
  Synthetic construct
catctttgtcaaaatttccttgg

SEQ ID NO: 1740 - DNA, 22 bp, Artificial Sequence
  Synthetic construct
tccttcagagttgatacagcga

SEQ ID NO: 1741 - DNA, 24 bp, Artificial Sequence
  Synthetic construct
ttgtcaaaatttccttggcttctt

SEQ ID NO: 1742 - DNA, 21 bp, Artificial Sequence
  Synthetic construct
caaccgttccttcagagttga

SEQ ID NO: 1743 - DNA, 27 bp, Artificial Sequence
  Synthetic construct
atttgaaaagtatctcatctttgtcaa

SEQ ID NO: 1744 - DNA, 21 bp, Artificial Sequence
  Synthetic construct
cccactcgagactacttcagc

SEQ ID NO: 1745 - DNA, 23 bp, Artificial Sequence
  Synthetic construct
tccacaattaaaggggaatcttc

SEQ ID NO: 1746 - DNA, 21 bp, Artificial Sequence
  Synthetic construct
ttcttcagccagaggtctcag

SEQ ID NO: 1747 - DNA, 20 bp, Artificial Sequence
  Synthetic construct
acctgaccccactcgagact

SEQ ID NO: 1748 - DNA, 27 bp, Artificial Sequence
  Synthetic construct
aactttaaactatccacaattaaaggg

SEQ ID NO: 1749 - DNA, 21 bp, Artificial Sequence
  Synthetic construct
ccagatttcttcagccagagg

SEQ ID NO: 1750 - DNA, 26 bp, Artificial Sequence
  Synthetic construct
ctttaaactatccacaattaaagggg

SEQ ID NO: 1751 - DNA, 23 bp, Artificial Sequence
  Synthetic construct
gaccctggtgaatgatgcctata

SEQ ID NO: 1752 - DNA, 27 bp, Artificial Sequence
  Synthetic construct
ctcacattgtcagtaaattctttctgt

SEQ ID NO: 1753 - DNA, 22 bp, Artificial Sequence
  Synthetic construct
cctgagcagaggactgtacctt

SEQ ID NO: 1754 - DNA, 23 bp, Artificial Sequence
  Synthetic construct
tccacaattaaaggggaatcttc

SEQ ID NO: 1755 - DNA, 20 bp, Artificial Sequence
  Synthetic construct
ctataagaccctcctggccc

SEQ ID NO: 1756 - DNA, 23 bp, Artificial Sequence
  Synthetic construct
catctttgtcaaaatttccttgg

SEQ ID NO: 1757 - DNA, 22 bp, Artificial Sequence
  Synthetic construct
tccttcagagttgatacagcga

SEQ ID NO: 1758 - DNA, 23 bp, Artificial Sequence
  Synthetic construct
aaatttccttggcttcttcaaag

SEQ ID NO: 1759 - DNA, 20 bp, Artificial Sequence
  Synthetic construct
atacagcgaagctccagcac

SEQ ID NO: 1760 - DNA, 24 bp, Artificial Sequence
  Synthetic construct
ttgtcaaaatttccttggcttctt

SEQ ID NO: 1761 - DNA, 22 bp, Artificial Sequence
  Synthetic construct
agagttgatacagcgaagctcc

SEQ ID NO: 1762 - DNA, 26 bp, Artificial Sequence
  Synthetic construct
ctttaaactatccacaattaaagggg

SEQ ID NO: 1763 - DNA, 21 bp, Artificial Sequence
  Synthetic construct
ttcttcagccagaggtctcag

SEQ ID NO: 1764 - DNA, 20 bp, Artificial Sequence
  Synthetic construct
cgtcttgtccacccagattt

SEQ ID NO: 1765 - DNA, 27 bp, Artificial Sequence
  Synthetic construct
gggaatcttctttaacttgatcttttc

SEQ ID NO: 1766 - DNA, 20 bp, Artificial Sequence
  Synthetic construct
tcagagaagcattcgaccct

SEQ ID NO: 1767 - DNA, 23 bp, Artificial Sequence
  Synthetic construct
cctgtccatttcataatctgtcc

SEQ ID NO: 1768 - DNA, 20 bp, Artificial Sequence
  Synthetic construct
gcctataagaccctcctggc

SEQ ID NO: 1769 - DNA, 22 bp, Artificial Sequence
  Synthetic construct
cagcttcactttcagcttctgc

SEQ ID NO: 1770 - DNA, 20 bp, Artificial Sequence
  Synthetic construct
ttcgaccctggtgaatgatg

SEQ ID NO: 1771 - DNA, 22 bp, Artificial Sequence
  Synthetic construct
ttctatgaggaattgcctgtcc

SEQ ID NO: 1772 - DNA, 22 bp, Artificial Sequence
  Synthetic construct
cctgagcagaggactgtacctt

SEQ ID NO: 1773 - DNA, 21 bp, Artificial Sequence
  Synthetic construct
ttcaatctctttcatggcagc

SEQ ID NO: 1774 - DNA, 23 bp, Artificial Sequence
  Synthetic construct
gaatgatgcctataagaccctcc

SEQ ID NO: 1775 - DNA, 22 bp, Artificial Sequence
  Synthetic construct
cactttcagcttctgcgagttt

SEQ ID NO: 1776 - DNA, 20 bp, Artificial Sequence
  Synthetic construct
aagcattcgaccctggtgaa

SEQ ID NO: 1777 - DNA, 20 bp, Artificial Sequence
  Synthetic construct
ggaattgcctgtccatttca

SEQ ID NO: 1778 - DNA, 23 bp, Artificial Sequence
  Synthetic construct
gaccctggtgaatgatgcctata

SEQ ID NO: 1779 - DNA, 24 bp, Artificial Sequence
  Synthetic construct
ccattatttctatgaggaattgcc

SEQ ID NO: 1780 - DNA, 22 bp, Artificial Sequence
  Synthetic construct
agagttgatacagcgaagctcc

SEQ ID NO: 1781 - DNA, 24 bp, Artificial Sequence
  Synthetic construct
tgtcctttcaggaatctctattcc

SEQ ID NO: 1782 - DNA, 21 bp, Artificial Sequence
  Synthetic construct
caaccgttccttcagagttga

SEQ ID NO: 1783 - DNA, 22 bp, Artificial Sequence
  Synthetic construct
ctttcatggcagcttcactttc

SEQ ID NO: 1784 - DNA, 22 bp, Artificial Sequence
  Synthetic construct
tccttcagagttgatacagcga

SEQ ID NO: 1785 - DNA, 23 bp, Artificial Sequence
  Synthetic construct
caggaatctctattccatggagc

SEQ ID NO: 1786 - DNA, 20 bp, Artificial Sequence
  Synthetic construct
atacagcgaagctccagcac

SEQ ID NO: 1787 - DNA, 25 bp, Artificial Sequence
  Synthetic construct
tttgacaatggattcaatctctttc

SEQ ID NO: 1788 - DNA, 27 bp, Artificial Sequence
  Synthetic construct
agttgatacagcgaagctccagcacag

SEQ ID NO: 1789 - DNA, 27 bp, Artificial Sequence
  Synthetic construct
caatggattcaatctctttcatggcag

SEQ ID NO: 1790 - DNA, 20 bp, Artificial Sequence
  Synthetic construct
cgtcttgtccacccagattt

SEQ ID NO: 1791 - DNA, 25 bp, Artificial Sequence
  Synthetic construct
ccatttcataatctgtcctttcagg

SEQ ID NO: 1792 - DNA, 21 bp, Artificial Sequence
  Synthetic construct
ccagatttcttcagccagagg

SEQ ID NO: 1793 - DNA, 22 bp, Artificial Sequence
  Synthetic construct
tgcgagtttttcattgatttcc

SEQ ID NO: 1794 - DNA, 20 bp, Artificial Sequence
  Synthetic construct
agcaactgcagcgtcttgtc

SEQ ID NO: 1795 - DNA, 26 bp, Artificial Sequence
  Synthetic construct
cataatctgtcctttcaggaatctct

SEQ ID NO: 1796 - DNA, 20 bp, Artificial Sequence
  Synthetic construct
aagctccagcacaggtacca

SEQ ID NO: 1797 - DNA, 22 bp, Artificial Sequence
  Synthetic construct
agcttctgcgagtttttcattg

SEQ ID NO: 1798 - DNA, 22 bp, Artificial Sequence
  Synthetic construct
gggagactggaagacttgaatg

SEQ ID NO: 1799 - DNA, 25 bp, Artificial Sequence
  Synthetic construct
cactgctcacattgtcagtaaattc

SEQ ID NO: 1800 - DNA, 24 bp, Artificial Sequence
  Synthetic construct
gactggaagacttgaatgaatagg

SEQ ID NO: 1801 - DNA, 27 bp, Artificial Sequence
  Synthetic construct
ctcacattgtcagtaaattctttctgt

SEQ ID NO: 1802 - DNA, 20 bp, Artificial Sequence
  Synthetic construct
ggcctgggagactggaagac

SEQ ID NO: 1803 - DNA, 23 bp, Artificial Sequence
  Synthetic construct
aaatttccttggcttcttcaaag

SEQ ID NO: 1804 - DNA, 18 bp, Artificial Sequence
  Synthetic construct
gtacttgaggggcagggc

SEQ ID NO: 1805 - DNA, 23 bp, Artificial Sequence
  Synthetic construct
catctttgtcaaaatttccttgg

SEQ ID NO: 1806 - DNA, 19 bp, Artificial Sequence
  Synthetic construct
ggcagggcctgggagactg

SEQ ID NO: 1807 - DNA, 27 bp, Artificial Sequence
  Synthetic construct
ctttgtcaaaatttccttggcttcttc

SEQ ID NO: 1808 - DNA, 20 bp, Artificial Sequence
  Synthetic construct
agcaactgcagcgtcttgtc

SEQ ID NO: 1809 - DNA, 27 bp, Artificial Sequence
  Synthetic construct
atttgaaaagtatctcatctttgtcaa

SEQ ID NO: 1810 - DNA, 22 bp, Artificial Sequence
  Synthetic construct
caccaccatccttaccatcatc

SEQ ID NO: 1811 - DNA, 21 bp, Artificial Sequence
  Synthetic construct
agaatgatgagcaagcacagc

SEQ ID NO: 1812 - DNA, 20 bp, Artificial Sequence
  Synthetic construct
cgacgacagaaccagcagtt

SEQ ID NO: 1813 - DNA, 20 bp, Artificial Sequence
  Synthetic construct
acacaacggcgacgacagaa

SEQ ID NO: 1814 - DNA, 20 bp, Artificial Sequence
  Synthetic construct
aagcacagcatggcgaacac

SEQ ID NO: 1815 - DNA, 22 bp, Artificial Sequence
  Synthetic construct
caccaccatccttaccatcatc

SEQ ID NO: 1816 - DNA, 20 bp, Artificial Sequence
  Synthetic construct
caaaatagcgccccagaatg

SEQ ID NO: 1817 - DNA, 21 bp, Artificial Sequence
  Synthetic construct
acaactatccctcctcccaca

SEQ ID NO: 1818 - DNA, 20 bp, Artificial Sequence
  Synthetic construct
atcgagccttcttcacctgc

SEQ ID NO: 1819 - DNA, 20 bp, Artificial Sequence
  Synthetic construct
atccctcctcccacaacaac

SEQ ID NO: 1820 - DNA, 20 bp, Artificial Sequence
  Synthetic construct
catgatccactgccctgatc

SEQ ID NO: 1821 - DNA, 20 bp, Artificial Sequence
  Synthetic construct
accaccaccaccatccttac

SEQ ID NO: 1822 - DNA, 21 bp, Artificial Sequence
  Synthetic construct
ttatgtctggcaaaatagcgc

SEQ ID NO: 1823 - DNA, 20 bp, Artificial Sequence
  Synthetic construct
cccccacaactatccctcct

SEQ ID NO: 1824 - DNA, 20 bp, Artificial Sequence
  Synthetic construct
ttcttcacctgctcgggaat

SEQ ID NO: 1825 - DNA, 20 bp, Artificial Sequence
  Synthetic construct
cctcccacaacaaccaccac

SEQ ID NO: 1826 - DNA, 20 bp, Artificial Sequence
  Synthetic construct
atgagcaagcacagcatggc

SEQ ID NO: 1827 - DNA, 22 bp, Artificial Sequence
  Synthetic construct
cccaacctgttcatcaataacc

SEQ ID NO: 1828 - DNA, 19 bp, Artificial Sequence
  Synthetic construct
ccctgatcgagccttcttc

SEQ ID NO: 1829 - DNA, 22 bp, Artificial Sequence
  Synthetic construct
atggtaacttgggtgagagtcg

SEQ ID NO: 1830 - DNA, 18 bp, Artificial Sequence
  Synthetic construct
caccgatcacggcatgat

SEQ ID NO: 1831 - DNA, 22 bp, Artificial Sequence
  Synthetic construct
atggtacataccgctgtgaagc

SEQ ID NO: 1832 - DNA, 20 bp, Artificial Sequence
  Synthetic construct
gccccagaatgatgagcaag

SEQ ID NO: 1833 - DNA, 20 bp, Artificial Sequence
  Synthetic construct
atgaaatgcctcaacacgcc

SEQ ID NO: 1834 - DNA, 20 bp, Artificial Sequence
  Synthetic construct
cactgccctgatcgagcctt

SEQ ID NO: 1835 - DNA, 22 bp, Artificial Sequence
  Synthetic construct
tggggaaagctcactcggatta

SEQ ID NO: 1836 - DNA, 23 bp, Artificial Sequence
  Synthetic construct
aatagcgccccagaatgatgagc

SEQ ID NO: 1837 - DNA, 22 bp, Artificial Sequence
  Synthetic construct
cttcaaacatagtggggaaagc

SEQ ID NO: 1838 - DNA, 20 bp, Artificial Sequence
  Synthetic construct
gctcctttggcttcatgagt

SEQ ID NO: 1839 - DNA, 25 bp, Artificial Sequence
  Synthetic construct
gctcactcggattatatgctgtatg

SEQ ID NO: 1840 - DNA, 22 bp, Artificial Sequence
  Synthetic construct
ttatagctgtgtctgcgtctgc

SEQ ID NO: 1841 - DNA, 23 bp, Artificial Sequence
  Synthetic construct
aacatagtggggaaagctcactc

SEQ ID NO: 1842 - DNA, 20 bp, Artificial Sequence
  Synthetic construct
gtcatcggctcctttggctt

SEQ ID NO: 1843 - DNA, 23 bp, Artificial Sequence
  Synthetic construct
tgtgaagcttcaaacatagtggg

SEQ ID NO: 1844 - DNA, 18 bp, Artificial Sequence
  Synthetic construct
tgcgtctgctgcgtcatc

SEQ ID NO: 1845 - DNA, 27 bp, Artificial Sequence
  Synthetic construct
ataccgctgtgaagcttcaaacatagt

SEQ ID NO: 1846 - DNA, 20 bp, Artificial Sequence
  Synthetic construct
gctgcgtcatcggctccttt

SEQ ID NO: 1847 - DNA, 24 bp, Artificial Sequence
  Synthetic construct
cagataatggtacataccgctgtg

SEQ ID NO: 1848 - DNA, 23 bp, Artificial Sequence
  Synthetic construct
cctccttctgcattgattatagc

SEQ ID NO: 1849 - DNA, 26 bp, Artificial Sequence
  Synthetic construct
aacaaaacagataatggtacataccg

SEQ ID NO: 1850 - DNA, 23 bp, Artificial Sequence
  Synthetic construct
cattgattatagctgtgtctgcg

SEQ ID NO: 1851 - DNA, 20 bp, Artificial Sequence
  Synthetic construct
tctgggcccaacctgttcat

SEQ ID NO: 1852 - DNA, 20 bp, Artificial Sequence
  Synthetic construct
gtgtctgcgtctgctgcgtc

SEQ ID NO: 1853 - DNA, 20 bp, Artificial Sequence
  Synthetic construct
gtactgtctgggcccaacct

SEQ ID NO: 1854 - DNA, 27 bp, Artificial Sequence
  Synthetic construct
ccttctgcattgattatagctgtgtct

SEQ ID NO: 1855 - DNA, 20 bp, Artificial Sequence
  Synthetic construct
cctcccacaacaaccaccac

SEQ ID NO: 1856 - DNA, 20 bp, Artificial Sequence
  Synthetic construct
aagcacagcatggcgaacac

SEQ ID NO: 1857 - DNA, 22 bp, Artificial Sequence
  Synthetic construct
cttcaaacatagtggggaaagc

SEQ ID NO: 1858 - DNA, 19 bp, Artificial Sequence
  Synthetic construct
atcacggcatgatccactg

SEQ ID NO: 1859 - DNA, 22 bp, Artificial Sequence
  Synthetic construct
atggtacataccgctgtgaagc

SEQ ID NO: 1860 - DNA, 18 bp, Artificial Sequence
  Synthetic construct
atggcgaacaccaccacc

SEQ ID NO: 1861 - DNA, 22 bp, Artificial Sequence
  Synthetic construct
tggggaaagctcactcggatta

SEQ ID NO: 1862 - DNA, 18 bp, Artificial Sequence
  Synthetic construct
cacgacgccaccgatcac

SEQ ID NO: 1863 - DNA, 26 bp, Artificial Sequence
  Synthetic construct
aacaaaacagataatggtacataccg

SEQ ID NO: 1864 - DNA, 21 bp, Artificial Sequence
  Synthetic construct
cctttggcttcatgagtgaag

SEQ ID NO: 1865 - DNA, 26 bp, Artificial Sequence
  Synthetic construct
gtacataccgctgtgaagcttcaaac

SEQ ID NO: 1866 - DNA, 20 bp, Artificial Sequence
  Synthetic construct
gctgcgtcatcggctccttt

SEQ ID NO: 1867 - DNA, 20 bp, Artificial Sequence
  Synthetic construct
tcaacacgccgtactgtctg

SEQ ID NO: 1868 - DNA, 25 bp, Artificial Sequence
  Synthetic construct
ttggcttcatgagtgaagtatgtac

SEQ ID NO: 1869 - DNA, 20 bp, Artificial Sequence
  Synthetic construct
atgcctcaacacgccgtact

SEQ ID NO: 1870 - DNA, 20 bp, Artificial Sequence
  Synthetic construct
cggctcctttggcttcatga

SEQ ID NO: 1871 - DNA, 21 bp, Artificial Sequence
  Synthetic construct
gagtcgatgatgaaatgcctc

SEQ ID NO: 1872 - DNA, 20 bp, Artificial Sequence
  Synthetic construct
ttcggagttgttctgtcctc

SEQ ID NO: 1873 - DNA, 20 bp, Artificial Sequence
  Synthetic construct
acgccgtactgtctgggccc

SEQ ID NO: 1874 - DNA, 27 bp, Artificial Sequence
  Synthetic construct
tcttcggagttgttctgtcctccttct

SEQ ID NO: 1875 - DNA, 26 bp, Artificial Sequence
  Synthetic construct
aacaaaacagataatggtacataccg

SEQ ID NO: 1876 - DNA, 20 bp, Artificial Sequence
  Synthetic construct
gctcctttggcttcatgagt

SEQ ID NO: 1877 - DNA, 21 bp, Artificial Sequence
  Synthetic construct
tgatgccttcaaggactttgt

SEQ ID NO: 1878 - DNA, 20 bp, Artificial Sequence
  Synthetic construct
ctgcccttgtaagacttggc

SEQ ID NO: 1879 - DNA, 22 bp, Artificial Sequence
  Synthetic construct
ccaggctctttactcctgaaga

SEQ ID NO: 1880 - DNA, 22 bp, Artificial Sequence
  Synthetic construct
tccagtataaggctccaaaagc

SEQ ID NO: 1881 - DNA, 20 bp, Artificial Sequence
  Synthetic construct
tcattcaagagcccagaacc

SEQ ID NO: 1882 - DNA, 20 bp, Artificial Sequence
  Synthetic construct
ctccaaaagcaaagccaatt

SEQ ID NO: 1883 - DNA, 25 bp, Artificial Sequence
  Synthetic construct
gtgtggtttcttcaacattaagtcc

SEQ ID NO: 1884 - DNA, 20 bp, Artificial Sequence
  Synthetic construct
taaggctccaaaagcaaagc

SEQ ID NO: 1885 - DNA, 23 bp, Artificial Sequence
  Synthetic construct
caaggactttgtagtggcatctg

SEQ ID NO: 1886 - DNA, 20 bp, Artificial Sequence
  Synthetic construct
gaaaacaatgctggcaatgc

SEQ ID NO: 1887 - DNA, 25 bp, Artificial Sequence
  Synthetic construct
gcatctgaaactagtgattgtgtgg

SEQ ID NO: 1888 - DNA, 23 bp, Artificial Sequence
  Synthetic construct
ataagagaaaacaatgctggcaa

SEQ ID NO: 1889 - DNA, 21 bp, Artificial Sequence
  Synthetic construct
gatccattgatgccttcaagg

SEQ ID NO: 1890 - DNA, 25 bp, Artificial Sequence
  Synthetic construct
ccaaaagcaaagccaattataagag

SEQ ID NO: 1891 - DNA, 21 bp, Artificial Sequence
  Synthetic construct
ccagaacccaggctctttact

SEQ ID NO: 1892 - DNA, 20 bp, Artificial Sequence
  Synthetic construct
gcccagtgtaggctggagtc

SEQ ID NO: 1893 - DNA, 26 bp, Artificial Sequence
  Synthetic construct
ggctctttactcctgaagaattcttt

SEQ ID NO: 1894 - DNA, 19 bp, Artificial Sequence
  Synthetic construct
ccatggctgcccagtgtag

SEQ ID NO: 1895 - DNA, 20 bp, Artificial Sequence
  Synthetic construct
aagagcccagaacccaggct

SEQ ID NO: 1896 - DNA, 19 bp, Artificial Sequence
  Synthetic construct
agggggatttttggccttc

SEQ ID NO: 1897 - DNA, 27 bp, Artificial Sequence
  Synthetic construct
ggactttgtagtggcatctgaaactag

SEQ ID NO: 1898 - DNA, 19 bp, Artificial Sequence
  Synthetic construct
aatgctggcaatgccatgg

SEQ ID NO: 1899 - DNA, 24 bp, Artificial Sequence
  Synthetic construct
tgccttcaaggactttgtagtggc

SEQ ID NO: 1900 - DNA, 20 bp, Artificial Sequence
  Synthetic construct
caatgccatggctgcccagt

SEQ ID NO: 1901 - DNA, 27 bp, Artificial Sequence
  Synthetic construct
aaaatcattcaagagcccagaacccag

SEQ ID NO: 1902 - DNA, 27 bp, Artificial Sequence
  Synthetic construct
gtataaggctccaaaagcaaagccaat

SEQ ID NO: 1903 - DNA, 23 bp, Artificial Sequence
  Synthetic construct
gtgattgtgtggtttcttcaaca

SEQ ID NO: 1904 - DNA, 20 bp, Artificial Sequence
  Synthetic construct
ctgcccttgtaagacttggc

SEQ ID NO: 1905 - DNA, 26 bp, Artificial Sequence
  Synthetic construct
gaaactagtgattgtgtggtttcttc

SEQ ID NO: 1906 - DNA, 24 bp, Artificial Sequence
  Synthetic construct
ccttgtaagacttggctgtctctt

SEQ ID NO: 1907 - DNA, 26 bp, Artificial Sequence
  Synthetic construct
ttcttcaacattaagtcctgagaaag

SEQ ID NO: 1908 - DNA, 24 bp, Artificial Sequence
  Synthetic construct
tttgtatattttcaactgcccttg

SEQ ID NO: 1909 - DNA, 26 bp, Artificial Sequence
  Synthetic construct
gtggagtgcgtgaaagaaaactcatc

SEQ ID NO: 1910 - DNA, 27 bp, Artificial Sequence
  Synthetic construct
caactgcccttgtaagacttggctgtc

SEQ ID NO: 1911 - DNA, 20 bp, Artificial Sequence
  Synthetic construct
tccccgggatggatgttttg

SEQ ID NO: 1912 - DNA, 24 bp, Artificial Sequence
  Synthetic construct
gtctccagggggatttttggcctt

SEQ ID NO: 1913 - DNA, 20 bp, Artificial Sequence
  Synthetic construct
gtgatggtgaacgggatcct

SEQ ID NO: 1914 - DNA, 18 bp, Artificial Sequence
  Synthetic construct
gttggcaggccacacgcc

SEQ ID NO: 1915 - DNA, 22 bp, Artificial Sequence
  Synthetic construct
acgggatcctcttcgtgcagta

SEQ ID NO: 1916 - DNA, 26 bp, Artificial Sequence
  Synthetic construct
ggatcctcttcgtgcagtacttccac

SEQ ID NO: 1917 - DNA, 18 bp, Artificial Sequence
  Synthetic construct
aatgggagccgggttggc

SEQ ID NO: 1918 - DNA, 20 bp, Artificial Sequence
  Synthetic construct
gtgatggtgaacgggatcct

SEQ ID NO: 1919 - DNA, 20 bp, Artificial Sequence
  Synthetic construct
gctctgcactgtgtggatga

SEQ ID NO: 1920 - DNA, 20 bp, Artificial Sequence
  Synthetic construct
gacaccatctccgtcaatgg

SEQ ID NO: 1921 - DNA, 20 bp, Artificial Sequence
  Synthetic construct
agagaacatctgtccagggg

SEQ ID NO: 1922 - DNA, 18 bp, Artificial Sequence
  Synthetic construct
agtacttccaccgcgtgc

SEQ ID NO: 1923 - DNA, 20 bp, Artificial Sequence
  Synthetic construct
tgtgtggatgactgtctggg

SEQ ID NO: 1924 - DNA, 20 bp, Artificial Sequence
  Synthetic construct
ggtgaacgggatcctcttcg

SEQ ID NO: 1925 - DNA, 23 bp, Artificial Sequence
  Synthetic construct
ctgcactgtgtggatgactgtct

SEQ ID NO: 1926 - DNA, 20 bp, Artificial Sequence
  Synthetic construct
ttccaccgtgtggacaccat

SEQ ID NO: 1927 - DNA, 20 bp, Artificial Sequence
  Synthetic construct
atctgtccaggggcgctctg

SEQ ID NO: 1928 - DNA, 20 bp, Artificial Sequence
  Synthetic construct
ccgtgtggacaccatctccg

SEQ ID NO: 1929 - DNA, 20 bp, Artificial Sequence
  Synthetic construct
aggggcgctctgcactgtgt

SEQ ID NO: 1930 - DNA, 20 bp, Artificial Sequence
  Synthetic construct
aatggctctgtgcagctgtc

SEQ ID NO: 1931 - DNA, 22 bp, Artificial Sequence
  Synthetic construct
gggtacatcataggtgggatgg

SEQ ID NO: 1932 - DNA, 21 bp, Artificial Sequence
  Synthetic construct
gctgtcctacatcagcttcca

SEQ ID NO: 1933 - DNA, 20 bp, Artificial Sequence
  Synthetic construct
ggggtgggggtacatcatag

SEQ ID NO: 1934 - DNA, 20 bp, Artificial Sequence
  Synthetic construct
tctccgtcaatggctctgtg

SEQ ID NO: 1935 - DNA, 20 bp, Artificial Sequence
  Synthetic construct
ataggtgggatggcgggagt

SEQ ID NO: 1936 - DNA, 23 bp, Artificial Sequence
  Synthetic construct
ggctctgtgcagctgtcctacat

SEQ ID NO: 1937 - DNA, 21 bp, Artificial Sequence
  Synthetic construct
ataggcggggtgggggtacat

SEQ ID NO: 1938 - DNA, 18 bp, Artificial Sequence
  Synthetic construct
gtgcccttccaccgtgtg

SEQ ID NO: 1939 - DNA, 20 bp, Artificial Sequence
  Synthetic construct
ggtacagccctcccagaatg

SEQ ID NO: 1940 - DNA, 24 bp, Artificial Sequence
  Synthetic construct
tgtgcagctgtcctacatcagctt

SEQ ID NO: 1941 - DNA, 20 bp, Artificial Sequence
  Synthetic construct
ggtggtgatgaaaggcatcg

SEQ ID NO: 1942 - DNA, 19 bp, Artificial Sequence
  Synthetic construct
cttccaccgcgtgcccttc

SEQ ID NO: 1943 - DNA, 21 bp, Artificial Sequence
  Synthetic construct
ccctcccagaatggtggtgat

SEQ ID NO: 1944 - DNA, 21 bp, Artificial Sequence
  Synthetic construct
ctggtgcagagctcagatttc

SEQ ID NO: 1945 - DNA, 21 bp, Artificial Sequence
  Synthetic construct
cagaatggtggtgatgaaagg

SEQ ID NO: 1946 - DNA, 20 bp, Artificial Sequence
  Synthetic construct
ctttgacctctgcttcctgg

SEQ ID NO: 1947 - DNA, 20 bp, Artificial Sequence
  Synthetic construct
tggacttggatgggtacagc

SEQ ID NO: 1948 - DNA, 19 bp, Artificial Sequence
  Synthetic construct
gcttcctggtgcagagctc

SEQ ID NO: 1949 - DNA, 20 bp, Artificial Sequence
  Synthetic construct
aggaggatggacttggatgg

SEQ ID NO: 1950 - DNA, 20 bp, Artificial Sequence
  Synthetic construct
acctctgcttcctggtgcag

SEQ ID NO: 1951 - DNA, 20 bp, Artificial Sequence
  Synthetic construct
ttggatgggtacagccctcc

SEQ ID NO: 1952 - DNA, 20 bp, Artificial Sequence
  Synthetic construct
atgccctttgacctctgctt

SEQ ID NO: 1953 - DNA, 20 bp, Artificial Sequence
  Synthetic construct
ctgacaggaggatggacttg

SEQ ID NO: 1954 - DNA, 20 bp, Artificial Sequence
  Synthetic construct
acacatgcctttccagaagg

SEQ ID NO: 1955 - DNA, 20 bp, Artificial Sequence
  Synthetic construct
aggacagtgcctgacaggag

SEQ ID NO: 1956 - DNA, 18 bp, Artificial Sequence
  Synthetic construct
tttccagaaggggatgcc

SEQ ID NO: 1957 - DNA, 20 bp, Artificial Sequence
  Synthetic construct
agtgcctgacaggaggatgg

SEQ ID NO: 1958 - DNA, 21 bp, Artificial Sequence
  Synthetic construct
aggagaggaagacacacatgc

SEQ ID NO: 1959 - DNA, 18 bp, Artificial Sequence
  Synthetic construct
cactgggcaggacagtgc

SEQ ID NO: 1960 - DNA, 20 bp, Artificial Sequence
  Synthetic construct
aggggatgccctttgacctc

SEQ ID NO: 1961 - DNA, 20 bp, Artificial Sequence
  Synthetic construct
tgggcaggacagtgcctgac

SEQ ID NO: 1962 - DNA, 21 bp, Artificial Sequence
  Synthetic construct
ggaagacacacatgcctttcc

SEQ ID NO: 1963 - DNA, 20 bp, Artificial Sequence
  Synthetic construct
ctgagcactgggcaggacag

SEQ ID NO: 1964 - DNA, 20 bp, Artificial Sequence
  Synthetic construct
ccaaggacacaaagccaatg

SEQ ID NO: 1965 - DNA, 20 bp, Artificial Sequence
  Synthetic construct
tggaagaactccacaaaccc

SEQ ID NO: 1966 - DNA, 20 bp, Artificial Sequence
  Synthetic construct
tggagaccttacgacgggtt

SEQ ID NO: 1967 - DNA, 20 bp, Artificial Sequence
  Synthetic construct
tactccagcaacacctgcaa

SEQ ID NO: 1968 - DNA, 20 bp, Artificial Sequence
  Synthetic construct
gaaggcgctggagaccttac

SEQ ID NO: 1969 - DNA, 20 bp, Artificial Sequence
  Synthetic construct
cacattcctgatgccacctt

SEQ ID NO: 1970 - DNA, 18 bp, Artificial Sequence
  Synthetic construct
gcagcgcaaccacgagac

SEQ ID NO: 1971 - DNA, 21 bp, Artificial Sequence
  Synthetic construct
caaaccagctcctactccagc

SEQ ID NO: 1972 - DNA, 20 bp, Artificial Sequence
  Synthetic construct
gacacaaagccaatgggcag

SEQ ID NO: 1973 - DNA, 24 bp, Artificial Sequence
  Synthetic construct
aggtcctctacatggaagaactcc

SEQ ID NO: 1974 - DNA, 18 bp, Artificial Sequence
  Synthetic construct
acgagacggccttccaag

SEQ ID NO: 1975 - DNA, 22 bp, Artificial Sequence
  Synthetic construct
ttagatatgccaaaccagctcc

SEQ ID NO: 1976 - DNA, 20 bp, Artificial Sequence
  Synthetic construct
cttacgacgggttggggatg

SEQ ID NO: 1977 - DNA, 20 bp, Artificial Sequence
  Synthetic construct
acacctgcaaaagccagcag

SEQ ID NO: 1978 - DNA, 20 bp, Artificial Sequence
  Synthetic construct
aaagccaatgggcaggtctg

SEQ ID NO: 1979 - DNA, 22 bp, Artificial Sequence
  Synthetic construct
ttcctgatgccaccttctaggt

SEQ ID NO: 1980 - DNA, 21 bp, Artificial Sequence
  Synthetic construct
ttatctctcggtaccttcggg

SEQ ID NO: 1981 - DNA, 24 bp, Artificial Sequence
  Synthetic construct
tctacatggaagaactccacaaac

SEQ ID NO: 1982 - DNA, 18 bp, Artificial Sequence
  Synthetic construct
caaccacgagacggcctt

SEQ ID NO: 1983 - DNA, 24 bp, Artificial Sequence
  Synthetic construct
atatgccaaaccagctcctactcc

SEQ ID NO: 1984 - DNA, 18 bp, Artificial Sequence
  Synthetic construct
gtctggggccaccagcag

SEQ ID NO: 1985 - DNA, 20 bp, Artificial Sequence
  Synthetic construct
aagccagcagcacattcctg

SEQ ID NO: 1986 - DNA, 20 bp, Artificial Sequence
  Synthetic construct
agcaggaaggcgctggagac

SEQ ID NO: 1987 - DNA, 20 bp, Artificial Sequence
  Synthetic construct
cagcaacacctgcaaaagcc

SEQ ID NO: 1988 - DNA, 18 bp, Artificial Sequence
  Synthetic construct
gtaccttcgggagcaggc

SEQ ID NO: 1989 - DNA, 24 bp, Artificial Sequence
  Synthetic construct
ccttctaggtcctctacatggaag

SEQ ID NO: 1990 - DNA, 18 bp, Artificial Sequence
  Synthetic construct
gggccaccagcaggaagg

SEQ ID NO: 1991 - DNA, 24 bp, Artificial Sequence
  Synthetic construct
tgatgccaccttctaggtcctcta

SEQ ID NO: 1992 - DNA, 18 bp, Artificial Sequence
  Synthetic construct
atgggcaggtctggggcc

SEQ ID NO: 1993 - DNA, 22 bp, Artificial Sequence
  Synthetic construct
cagcagcacattcctgatgcca

SEQ ID NO: 1994 - DNA, 19 bp, Artificial Sequence
  Synthetic construct
cggcgccaaggacacaaag

SEQ ID NO: 1995 - DNA, 20 bp, Artificial Sequence
  Synthetic construct
tgcaaaagccagcagcacat

SEQ ID NO: 1996 - DNA, 23 bp, Artificial Sequence
  Synthetic construct
gtaccggcagtcgctggagatta

SEQ ID NO: 1997 - DNA, 27 bp, Artificial Sequence
  Synthetic construct
cagcacattcctgatgccaccttctag

SEQ ID NO: 1998 - DNA, 20 bp, Artificial Sequence
  Synthetic construct
gtttactggtgatcgctgcc

SEQ ID NO: 1999 - DNA, 22 bp, Artificial Sequence
  Synthetic construct
tgggctgtggaagtatagtgac

SEQ ID NO: 2000 - DNA, 20 bp, Artificial Sequence
  Synthetic construct
accacacacatgatgccgac

SEQ ID NO: 2001 - DNA, 21 bp, Artificial Sequence
  Synthetic construct
gtgcccaaatgagtttactgg

SEQ ID NO: 2002 - DNA, 19 bp, Artificial Sequence
  Synthetic construct
acatgatgccgaccacaag

SEQ ID NO: 2003 - DNA, 20 bp, Artificial Sequence
  Synthetic construct
gatcgctgccaaaactacgt

SEQ ID NO: 2004 - DNA, 20 bp, Artificial Sequence
  Synthetic construct
taggccaccacacacatgat

SEQ ID NO: 2005 - DNA, 23 bp, Artificial Sequence
  Synthetic construct
ccaaatgagtttactggtgatcg

SEQ ID NO: 2006 - DNA, 20 bp, Artificial Sequence
  Synthetic construct
ttggttttgcagtaggccac

SEQ ID NO: 2007 - DNA, 21 bp, Artificial Sequence
  Synthetic construct
ctgccaaaactacgtaatggc

SEQ ID NO: 2008 - DNA, 20 bp, Artificial Sequence
  Synthetic construct
tttgcagtaggccaccacac

SEQ ID NO: 2009 - DNA, 27 bp, Artificial Sequence
  Synthetic construct
aatgagtttactggtgatcgctgccaa

SEQ ID NO: 2010 - DNA, 21 bp, Artificial Sequence
  Synthetic construct
cacaaggagggcgatgcagat

SEQ ID NO: 2011 - DNA, 24 bp, Artificial Sequence
  Synthetic construct
actggtgatcgctgccaaaactac

SEQ ID NO: 2012 - DNA, 20 bp, Artificial Sequence
  Synthetic construct
gatgccgaccacaaggaggg

SEQ ID NO: 2013 - DNA, 27 bp, Artificial Sequence
  Synthetic construct
gtgatcgctgccaaaactacgtaatgg

SEQ ID NO: 2014 - DNA, 21 bp, Artificial Sequence
  Synthetic construct
ggcgatgcagatgccggttat

SEQ ID NO: 2015 - DNA, 21 bp, Artificial Sequence
  Synthetic construct
ctgggacaagccatcttgtaa

SEQ ID NO: 2016 - DNA, 22 bp, Artificial Sequence
  Synthetic construct
tatggtcagcactctcttctgg

SEQ ID NO: 2017 - DNA, 22 bp, Artificial Sequence
  Synthetic construct
gagtgcttcatggtgaaagacc

SEQ ID NO: 2018 - DNA, 22 bp, Artificial Sequence
  Synthetic construct
tctcttctggtacagctcctcc

SEQ ID NO: 2019 - DNA, 22 bp, Artificial Sequence
  Synthetic construct
aactttctgtgtgaatggaggg

SEQ ID NO: 2020 - DNA, 20 bp, Artificial Sequence
  Synthetic construct
agatgccggttatggtcagc

SEQ ID NO: 2021 - DNA, 22 bp, Artificial Sequence
  Synthetic construct
tacatctacatccaccactggg

SEQ ID NO: 2022 - DNA, 23 bp, Artificial Sequence
  Synthetic construct
tcagcactctcttctggtacagc

SEQ ID NO: 2023 - DNA, 21 bp, Artificial Sequence
  Synthetic construct
aacccctcgagatacttgtgc

SEQ ID NO: 2024 - DNA, 20 bp, Artificial Sequence
  Synthetic construct
ccggttatggtcagcactct

SEQ ID NO: 2025 - DNA, 26 bp, Artificial Sequence
  Synthetic construct
atctacatccaccactgggacaagcc

SEQ ID NO: 2026 - DNA, 27 bp, Artificial Sequence
  Synthetic construct
agatgccggttatggtcagcactctct

SEQ ID NO: 2027 - DNA, 21 bp, Artificial Sequence
  Synthetic construct
acgtaatggccagcttctaca

SEQ ID NO: 2028 - DNA, 20 bp, Artificial Sequence
  Synthetic construct
ggtgggttaggatggtgagg

SEQ ID NO: 2029 - DNA, 23 bp, Artificial Sequence
  Synthetic construct
aaaactacgtaatggccagcttc

SEQ ID NO: 2030 - DNA, 20 bp, Artificial Sequence
  Synthetic construct
tgtttcgttcagaccgaagg

SEQ ID NO: 2031 - DNA, 21 bp, Artificial Sequence
  Synthetic construct
gtgcggagaaggagaaaactt

SEQ ID NO: 2032 - DNA, 20 bp, Artificial Sequence
  Synthetic construct
gaagacggtcatgcagcttt

SEQ ID NO: 2033 - DNA, 20 bp, Artificial Sequence
  Synthetic construct
aagacctttcaaacccctcg

SEQ ID NO: 2034 - DNA, 19 bp, Artificial Sequence
  Synthetic construct
cccattggcaatgttcatc

SEQ ID NO: 2035 - DNA, 22 bp, Artificial Sequence
  Synthetic construct
cttgtaaaatgtgcggagaagg

SEQ ID NO: 2036 - DNA, 23 bp, Artificial Sequence
  Synthetic construct
gcaatgttcatcatattgtttcg

SEQ ID NO: 2037 - DNA, 20 bp, Artificial Sequence
  Synthetic construct
gtgaatggaggggagtgctt

SEQ ID NO: 2038 - DNA, 20 bp, Artificial Sequence
  Synthetic construct
ttaggatggtgaggcccatt

SEQ ID NO: 2039 - DNA, 22 bp, Artificial Sequence
  Synthetic construct
caagccatcttgtaaaatgtgc

SEQ ID NO: 2040 - DNA, 24 bp, Artificial Sequence
  Synthetic construct
tcatcatattgtttcgttcagacc

SEQ ID NO: 2041 - DNA, 22 bp, Artificial Sequence
  Synthetic construct
cctttcaaacccctcgagatac

SEQ ID NO: 2042 - DNA, 20 bp, Artificial Sequence
  Synthetic construct
gcagctttttccgctgtttc

SEQ ID NO: 2043 - DNA, 23 bp, Artificial Sequence
  Synthetic construct
catggtgaaagacctttcaaacc

SEQ ID NO: 2044 - DNA, 18 bp, Artificial Sequence
  Synthetic construct
aaggctctgccgaagacg

SEQ ID NO: 2045 - DNA, 19 bp, Artificial Sequence
  Synthetic construct
gaggggagtgcttcatggt

SEQ ID NO: 2046 - DNA, 20 bp, Artificial Sequence
  Synthetic construct
tcaccagctggacattctcg

SEQ ID NO: 2047 - DNA, 24 bp, Artificial Sequence
  Synthetic construct
taaaatgtgcggagaaggagaaaa

SEQ ID NO: 2048 - DNA, 20 bp, Artificial Sequence
  Synthetic construct
cgttcagaccgaaggctctg

SEQ ID NO: 2049 - DNA, 24 bp, Artificial Sequence
  Synthetic construct
ttctgtgtgaatggaggggagtgc

SEQ ID NO: 2050 - DNA, 20 bp, Artificial Sequence
  Synthetic construct
tgaggcccattggcaatgtt

SEQ ID NO: 2051 - DNA, 27 bp, Artificial Sequence
  Synthetic construct
aggagaaaactttctgtgtgaatggag

SEQ ID NO: 2052 - DNA, 20 bp, Artificial Sequence
  Synthetic construct
gaccgaaggctctgccgaag

SEQ ID NO: 2053 - DNA, 27 bp, Artificial Sequence
  Synthetic construct
ctcccattagaatatcagtatccacag

SEQ ID NO: 2054 - DNA, 20 bp, Artificial Sequence
  Synthetic construct
gtcatgcagctttttccgct

SEQ ID NO: 2055 - DNA, 20 bp, Artificial Sequence
  Synthetic construct
atgccagcctcaactgaagg

SEQ ID NO: 2056 - DNA, 27 bp, Artificial Sequence
  Synthetic construct
atattgtttcgttcagaccgaaggctc

SEQ ID NO: 2057 - DNA, 23 bp, Artificial Sequence
  Synthetic construct
tccacagaaggagcaaatacttc

SEQ ID NO: 2058 - DNA, 24 bp, Artificial Sequence
  Synthetic construct
ctggagatgacgtttttagatacg

SEQ ID NO: 2059 - DNA, 20 bp, Artificial Sequence
  Synthetic construct
tcgtatctggagggttctgg

SEQ ID NO: 2060 - DNA, 20 bp, Artificial Sequence
  Synthetic construct
tcagattccatgtgtgctcg

SEQ ID NO: 2061 - DNA, 20 bp, Artificial Sequence
  Synthetic construct
tcgtatctggagggttctgg

SEQ ID NO: 2062 - DNA, 20 bp, Artificial Sequence
  Synthetic construct
tctcgaacagccttctcacg

SEQ ID NO: 2063 - DNA, 22 bp, Artificial Sequence
  Synthetic construct
cgagatgtctgctttcaccttc

SEQ ID NO: 2064 - DNA, 20 bp, Artificial Sequence
  Synthetic construct
tcagattccatgtgtgctcg

SEQ ID NO: 2065 - DNA, 22 bp, Artificial Sequence
  Synthetic construct
actcacagacaccacttcgaga

SEQ ID NO: 2066 - DNA, 22 bp, Artificial Sequence
  Synthetic construct
tctctttagcccaagattcagg

SEQ ID NO: 2067 - DNA, 20 bp, Artificial Sequence
  Synthetic construct
tgtgatagcggaggagcaaa

SEQ ID NO: 2068 - DNA, 25 bp, Artificial Sequence
  Synthetic construct
tctgggtaaggaaagtctctttagc

SEQ ID NO: 2069 - DNA, 20 bp, Artificial Sequence
  Synthetic construct
cccacttccttcgtatctgg

SEQ ID NO: 2070 - DNA, 20 bp, Artificial Sequence
  Synthetic construct
gggtaagcagctctcgaaca

SEQ ID NO: 2071 - DNA, 21 bp, Artificial Sequence
  Synthetic construct
gagggttctggctgtgtgata

SEQ ID NO: 2072 - DNA, 20 bp, Artificial Sequence
  Synthetic construct
caagattcaggggtctccaa

SEQ ID NO: 2073 - DNA, 21 bp, Artificial Sequence
  Synthetic construct
acaccacttcgagatgtctgc

SEQ ID NO: 2074 - DNA, 20 bp, Artificial Sequence
  Synthetic construct
atccatttggcaggtacacg

SEQ ID NO: 2075 - DNA, 22 bp, Artificial Sequence
  Synthetic construct
aggagcaaaactcacagacacc

SEQ ID NO: 2076 - DNA, 22 bp, Artificial Sequence
  Synthetic construct
gtacacggagcttctgggtaag

SEQ ID NO: 2077 - DNA, 20 bp, Artificial Sequence
  Synthetic construct
ctggctgtgtgatagcggag

SEQ ID NO: 2078 - DNA, 23 bp, Artificial Sequence
  Synthetic construct
aggaaagtctctttagcccaaga

SEQ ID NO: 2079 - DNA, 22 bp, Artificial Sequence
  Synthetic construct
tgacagtgacagatatgcctgc

SEQ ID NO: 2080 - DNA, 20 bp, Artificial Sequence
  Synthetic construct
agcagctctcgaacagcctt

SEQ ID NO: 2081 - DNA, 22 bp, Artificial Sequence
  Synthetic construct
cttccttcgtatctggagggtt

SEQ ID NO: 2082 - DNA, 20 bp, Artificial Sequence
  Synthetic construct
gtctccaacagctggcagtg

SEQ ID NO: 2083 - DNA, 22 bp, Artificial Sequence
  Synthetic construct
atagcggaggagcaaaactcac

SEQ ID NO: 2084 - DNA, 22 bp, Artificial Sequence
  Synthetic construct
ggagcttctgggtaaggaaagt

SEQ ID NO: 2085 - DNA, 27 bp, Artificial Sequence
  Synthetic construct
ctgctttcaccttctaaaactctacag

SEQ ID NO: 2086 - DNA, 18 bp, Artificial Sequence
  Synthetic construct
gcctcgtggatccatttg

SEQ ID NO: 2087 - DNA, 24 bp, Artificial Sequence
  Synthetic construct
ccacttcgagatgtctgctttcac

SEQ ID NO: 2088 - DNA, 20 bp, Artificial Sequence
  Synthetic construct
tcgtggatccatttggcagg

SEQ ID NO: 2089 - DNA, 23 bp, Artificial Sequence
  Synthetic construct
tatctggagggttctggctgtgt

SEQ ID NO: 2090 - DNA, 20 bp, Artificial Sequence
  Synthetic construct
agtgccgggtaagcagctct

SEQ ID NO: 2091 - DNA, 20 bp, Artificial Sequence
  Synthetic construct
atatgcctgctccccacttc

SEQ ID NO: 2092 - DNA, 20 bp, Artificial Sequence
  Synthetic construct
ttcaggggtctccaacagct

SEQ ID NO: 2093 - DNA, 22 bp, Artificial Sequence
  Synthetic construct
cctgctccccacttccttcgta

SEQ ID NO: 2094 - DNA, 27 bp, Artificial Sequence
  Synthetic construct
agctctcgaacagccttctcacgtatg

SEQ ID NO: 2095 - DNA, 27 bp, Artificial Sequence
  Synthetic construct
gagcaaaactcacagacaccacttcga

SEQ ID NO: 2096 - DNA, 23 bp, Artificial Sequence
  Synthetic construct
catttggcaggtacacggagctt

SEQ ID NO: 2097 - DNA, 27 bp, Artificial Sequence
  Synthetic construct
ctgtgtgatagcggaggagcaaaactc

SEQ ID NO: 2098 - DNA, 20 bp, Artificial Sequence
  Synthetic construct
agctggcagtgccgggtaag

SEQ ID NO: 2099 - DNA, 20 bp, Artificial Sequence
  Synthetic construct
gacagatatgcctgctcccc

SEQ ID NO: 2100 - DNA, 23 bp, Artificial Sequence
  Synthetic construct
ttagcccaagattcaggggtctc

SEQ ID NO: 2101 - DNA, 26 bp, Artificial Sequence
  Synthetic construct
aatacctctgacagtgacagatatgc

SEQ ID NO: 2102 - DNA, 18 bp, Artificial Sequence
  Synthetic construct
gctttggcctcgtggatc

SEQ ID NO: 2103 - DNA, 20 bp, Artificial Sequence
  Synthetic construct
acttgtgggaagtgctgagg

SEQ ID NO: 2104 - DNA, 20 bp, Artificial Sequence
  Synthetic construct
tcagattccatgtgtgctcg

SEQ ID NO: 2105 - DNA, 21 bp, Artificial Sequence
  Synthetic construct
tcgaagcataacagcagatcc

SEQ ID NO: 2106 - DNA, 22 bp, Artificial Sequence
  Synthetic construct
tctctttagcccaagattcagg

SEQ ID NO: 2107 - DNA, 22 bp, Artificial Sequence
  Synthetic construct
taactacacccatctctcagcg

SEQ ID NO: 2108 - DNA, 20 bp, Artificial Sequence
  Synthetic construct
atccatttggcaggtacacg

SEQ ID NO: 2109 - DNA, 21 bp, Artificial Sequence
  Synthetic construct
atcctttggactaccgcctaa

SEQ ID NO: 2110 - DNA, 22 bp, Artificial Sequence
  Synthetic construct
ggagcttctgggtaaggaaagt

SEQ ID NO: 2111 - DNA, 22 bp, Artificial Sequence
  Synthetic construct
cattatgatctcaaccagctgc

SEQ ID NO: 2112 - DNA, 20 bp, Artificial Sequence
  Synthetic construct
tctcgaacagccttctcacg

SEQ ID NO: 2113 - DNA, 20 bp, Artificial Sequence
  Synthetic construct
taagctggcacttgtgggaa

SEQ ID NO: 2114 - DNA, 25 bp, Artificial Sequence
  Synthetic construct
tctgggtaaggaaagtctctttagc

SEQ ID NO: 2115 - DNA, 22 bp, Artificial Sequence
  Synthetic construct
acagcagatcctttggactacc

SEQ ID NO: 2116 - DNA, 20 bp, Artificial Sequence
  Synthetic construct
gggtaagcagctctcgaaca

SEQ ID NO: 2117 - DNA, 24 bp, Artificial Sequence
  Synthetic construct
agtgctgagggctcttaactacac

SEQ ID NO: 2118 - DNA, 22 bp, Artificial Sequence
  Synthetic construct
gtacacggagcttctgggtaag

SEQ ID NO: 2119 - DNA, 24 bp, Artificial Sequence
  Synthetic construct
ggctcttaactacacccatctctc

SEQ ID NO: 2120 - DNA, 23 bp, Artificial Sequence
  Synthetic construct
aggaaagtctctttagcccaaga

SEQ ID NO: 2121 - DNA, 21 bp, Artificial Sequence
  Synthetic construct
atctctcagcgcagtgtgaag

SEQ ID NO: 2122 - DNA, 18 bp, Artificial Sequence
  Synthetic construct
gcctcgtggatccatttg

SEQ ID NO: 2123 - DNA, 20 bp, Artificial Sequence
  Synthetic construct
actaccgcctaagctggcac

SEQ ID NO: 2124 - DNA, 20 bp, Artificial Sequence
  Synthetic construct
caagattcaggggtctccaa

SEQ ID NO: 2125 - DNA, 20 bp, Artificial Sequence
  Synthetic construct
gagcctcgaagcataacagc

SEQ ID NO: 2126 - DNA, 20 bp, Artificial Sequence
  Synthetic construct
gtctccaacagctggcagtg

SEQ ID NO: 2127 - DNA, 23 bp, Artificial Sequence
  Synthetic construct
agcataacagcagatcctttgga

SEQ ID NO: 2128 - DNA, 20 bp, Artificial Sequence
  Synthetic construct
agtgccgggtaagcagctct

SEQ ID NO: 2129 - DNA, 20 bp, Artificial Sequence
  Synthetic construct
tgggaagtgctgagggctct

SEQ ID NO: 2130 - DNA, 23 bp, Artificial Sequence
  Synthetic construct
catttggcaggtacacggagctt

SEQ ID NO: 2131 - DNA, 23 bp, Artificial Sequence
  Synthetic construct
acacccatctctcagcgcagtgt

SEQ ID NO: 2132 - DNA, 20 bp, Artificial Sequence
  Synthetic construct
tcgtggatccatttggcagg

SEQ ID NO: 2133 - DNA, 20 bp, Artificial Sequence
  Synthetic construct
tgctggagcctcgaagcata

SEQ ID NO: 2134 - DNA, 20 bp, Artificial Sequence
  Synthetic construct
agcagctctcgaacagcctt

SEQ ID NO: 2135 - DNA, 24 bp, Artificial Sequence
  Synthetic construct
ctttggactaccgcctaagctggc

SEQ ID NO: 2136 - DNA, 20 bp, Artificial Sequence
  Synthetic construct
agctggcagtgccgggtaag

SEQ ID NO: 2137 - DNA, 27 bp, Artificial Sequence
  Synthetic construct
acttgtgggaagtgctgagggctctta

SEQ ID NO: 2138 - DNA, 20 bp, Artificial Sequence
  Synthetic construct
tgagcttgtggcagcggttc

SEQ ID NO: 2139 - DNA, 22 bp, Artificial Sequence
  Synthetic construct
cgagatgtctgctttcaccttc

SEQ ID NO: 2140 - DNA, 18 bp, Artificial Sequence
  Synthetic construct
gctttggcctcgtggatc

SEQ ID NO: 2141 - DNA, 27 bp, Artificial Sequence
  Synthetic construct
ctgctttcaccttctaaaactctacag

SEQ ID NO: 2142 - DNA, 20 bp, Artificial Sequence
  Synthetic construct
atgtgtgctcgcacagcttt

SEQ ID NO: 2143 - DNA, 21 bp, Artificial Sequence
  Synthetic construct
acaccacttcgagatgtctgc

SEQ ID NO: 2144 - DNA, 18 bp, Artificial Sequence
  Synthetic construct
gcacagctttggcctcgt

SEQ ID NO: 2145 - DNA, 23 bp, Artificial Sequence
  Synthetic construct
cctgctccccacttccttcgtat

SEQ ID NO: 2146 - DNA, 27 bp, Artificial Sequence
  Synthetic construct
agctctcgaacagccttctcacgtatg

SEQ ID NO: 2147 - DNA, 22 bp, Artificial Sequence
  Synthetic construct
actcacagacaccacttcgaga

SEQ ID NO: 2148 - DNA, 22 bp, Artificial Sequence
  Synthetic construct
agtgcttgtcagattccatgtg

SEQ ID NO: 2149 - DNA, 22 bp, Artificial Sequence
  Synthetic construct
aggagcaaaactcacagacacc

SEQ ID NO: 2150 - DNA, 22 bp, Artificial Sequence
  Synthetic construct
ggcctctaagtgcttgtcagat

SEQ ID NO: 2151 - DNA, 27 bp, Artificial Sequence
  Synthetic construct
gagcaaaactcacagacaccacttcga

SEQ ID NO: 2152 - DNA, 27 bp, Artificial Sequence
  Synthetic construct
ggtaagcagctctcgaacagccttctc

SEQ ID NO: 2153 - DNA, 24 bp, Artificial Sequence
  Synthetic construct
ccacttcgagatgtctgctttcac

SEQ ID NO: 2154 - DNA, 22 bp, Artificial Sequence
  Synthetic construct
agccttaaataagcaaagggcc

SEQ ID NO: 2155 - DNA, 20 bp, Artificial Sequence
  Synthetic construct
tgtgatagcggaggagcaaa

SEQ ID NO: 2156 - DNA, 22 bp, Artificial Sequence
  Synthetic construct
taagcaaagggcctctaagtgc

SEQ ID NO: 2157 - DNA, 27 bp, Artificial Sequence
  Synthetic construct
ctgtgtgatagcggaggagcaaaactc

SEQ ID NO: 2158 - DNA, 24 bp, Artificial Sequence
  Synthetic construct
agctttggcctcgtggatccattt

SEQ ID NO: 2159 - DNA, 27 bp, Artificial Sequence
  Synthetic construct
atagcggaggagcaaaactcacagaca

SEQ ID NO: 2160 - DNA, 20 bp, Artificial Sequence
  Synthetic construct
tgctcgcacagctttggcct

SEQ ID NO: 2161 - DNA, 20 bp, Artificial Sequence
  Synthetic construct
ttctggctgtgtgatagcgg

SEQ ID NO: 2162 - DNA, 27 bp, Artificial Sequence
  Synthetic construct
ccttaaataagcaaagggcctctaagt

SEQ ID NO: 2163 - DNA, 24 bp, Artificial Sequence
  Synthetic construct
tccccacttccttcgtatctggag

SEQ ID NO: 2164 - DNA, 23 bp, Artificial Sequence
  Synthetic construct
gattccatgtgtgctcgcacagc

SEQ ID NO: 2165 - DNA, 20 bp, Artificial Sequence
  Synthetic construct
gacagatatgcctgctcccc

SEQ ID NO: 2166 - DNA, 22 bp, Artificial Sequence
  Synthetic construct
tctctttagcccaagattcagg

SEQ ID NO: 2167 - DNA, 23 bp, Artificial Sequence
  Synthetic construct
gacagtgacagatatgcctgctc

SEQ ID NO: 2168 - DNA, 25 bp, Artificial Sequence
  Synthetic construct
tctgggtaaggaaagtctctttagc

SEQ ID NO: 2169 - DNA, 24 bp, Artificial Sequence
  Synthetic construct
ggagggttctggctgtgtgatagc

SEQ ID NO: 2170 - DNA, 20 bp, Artificial Sequence
  Synthetic construct
tcgtggatccatttggcagg

SEQ ID NO: 2171 - DNA, 27 bp, Artificial Sequence
  Synthetic construct
agtgacagatatgcctgctccccactt

SEQ ID NO: 2172 - DNA, 20 bp, Artificial Sequence
  Synthetic construct
tgctcgcacagctttggcct

SEQ ID NO: 2173 - DNA, 20 bp, Artificial Sequence
  Synthetic construct
atttgcttccaccaacagcc

SEQ ID NO: 2174 - DNA, 20 bp, Artificial Sequence
  Synthetic construct
caagattcaggggtctccaa

SEQ ID NO: 2175 - DNA, 22 bp, Artificial Sequence
  Synthetic construct
cgctcagcatgtatgaagaagc

SEQ ID NO: 2176 - DNA, 23 bp, Artificial Sequence
  Synthetic construct
aggaaagtctctttagcccaaga

SEQ ID NO: 2177 - DNA, 25 bp, Artificial Sequence
  Synthetic construct
cagcatgtatgaagaagcatttcag

SEQ ID NO: 2178 - DNA, 23 bp, Artificial Sequence
  Synthetic construct
ttagcccaagattcaggggtctc

SEQ ID NO: 2179 - DNA, 22 bp, Artificial Sequence
  Synthetic construct
cttccaccaacagcctccattt

SEQ ID NO: 2180 - DNA, 20 bp, Artificial Sequence
  Synthetic construct
agctggcagtgccgggtaag

SEQ ID NO: 2181 - DNA, 20 bp, Artificial Sequence
  Synthetic construct
ggaaacgctccctggctatc

SEQ ID NO: 2182 - DNA, 24 bp, Artificial Sequence
  Synthetic construct
gtaagcagctctcgaacagccttc

SEQ ID NO: 2183 - DNA, 20 bp, Artificial Sequence
  Synthetic construct
acagcctccatttctagggc

SEQ ID NO: 2184 - DNA, 22 bp, Artificial Sequence
  Synthetic construct
ggcctctaagtgcttgtcagat

SEQ ID NO: 2185 - DNA, 22 bp, Artificial Sequence
  Synthetic construct
cctccatttctagggcgctcag

SEQ ID NO: 2186 - DNA, 23 bp, Artificial Sequence
  Synthetic construct
gattccatgtgtgctcgcacagc

SEQ ID NO: 2187 - DNA, 24 bp, Artificial Sequence
  Synthetic construct
catttctagggcgctcagcatgta

SEQ ID NO: 2188 - DNA, 27 bp, Artificial Sequence
  Synthetic construct
agcaaagggcctctaagtgcttgtcag

SEQ ID NO: 2189 - DNA, 20 bp, Artificial Sequence
  Synthetic construct
ggcacacgtttctccactct

SEQ ID NO: 2190 - DNA, 22 bp, Artificial Sequence
  Synthetic construct
gataacacctttcctcctgcac

SEQ ID NO: 2191 - DNA, 22 bp, Artificial Sequence
  Synthetic construct
tgagcagaactacattctccga

SEQ ID NO: 2192 - DNA, 22 bp, Artificial Sequence
  Synthetic construct
catagtggaaagacttgggcag

SEQ ID NO: 2193 - DNA, 22 bp, Artificial Sequence
  Synthetic construct
ctctttcagcttggaagaatcc

SEQ ID NO: 2194 - DNA, 21 bp, Artificial Sequence
  Synthetic construct
gcacactctacgattgccttc

SEQ ID NO: 2195 - DNA, 22 bp, Artificial Sequence
  Synthetic construct
tacattctccgagatgctgagg

SEQ ID NO: 2196 - DNA, 22 bp, Artificial Sequence
  Synthetic construct
cgattgccttcatagtggaaag

SEQ ID NO: 2197 - DNA, 20 bp, Artificial Sequence
  Synthetic construct
atccttaaaacgggcacacg

SEQ ID NO: 2198 - DNA, 22 bp, Artificial Sequence
  Synthetic construct
tgcttggataacacctttcctc

SEQ ID NO: 2199 - DNA, 24 bp, Artificial Sequence
  Synthetic construct
cagaactacattctccgagatgct

SEQ ID NO: 2200 - DNA, 21 bp, Artificial Sequence
  Synthetic construct
tttcctcctgcacactctacg

SEQ ID NO: 2201 - DNA, 21 bp, Artificial Sequence
  Synthetic construct
tggaagaatccttaaaacggg

SEQ ID NO: 2202 - DNA, 20 bp, Artificial Sequence
  Synthetic construct
ttctgcttgtgctccatgag

SEQ ID NO: 2203 - DNA, 19 bp, Artificial Sequence
  Synthetic construct
aaacgggcacacgtttctc

SEQ ID NO: 2204 - DNA, 20 bp, Artificial Sequence
  Synthetic construct
ggaaagatggctgcttggat

SEQ ID NO: 2205 - DNA, 25 bp, Artificial Sequence
  Synthetic construct
ggcagaagtacttttctctttcagc

SEQ ID NO: 2206 - DNA, 24 bp, Artificial Sequence
  Synthetic construct
actctacgattgccttcatagtgg

SEQ ID NO: 2207 - DNA, 24 bp, Artificial Sequence
  Synthetic construct
tcagcttggaagaatccttaaaac

SEQ ID NO: 2208 - DNA, 20 bp, Artificial Sequence
  Synthetic construct
atgagcttccggaaagatgg

SEQ ID NO: 2209 - DNA, 24 bp, Artificial Sequence
  Synthetic construct
acttttctctttcagcttggaaga

SEQ ID NO: 2210 - DNA, 20 bp, Artificial Sequence
  Synthetic construct
cttgtgctccatgagcttcc

SEQ ID NO: 2211 - DNA, 26 bp, Artificial Sequence
  Synthetic construct
cttaaaacgggcacacgtttctccac

SEQ ID NO: 2212 - DNA, 22 bp, Artificial Sequence
  Synthetic construct
gcttccggaaagatggctgctt

SEQ ID NO: 2213 - DNA, 20 bp, Artificial Sequence
  Synthetic construct
cgatttctgtcgtgaagcac

SEQ ID NO: 2214 - DNA, 22 bp, Artificial Sequence
  Synthetic construct
gcagattccaggtgtgatgtaa

SEQ ID NO: 2215 - DNA, 22 bp, Artificial Sequence
  Synthetic construct
acattcttggtggagaggttgc

SEQ ID NO: 2216 - DNA, 21 bp, Artificial Sequence
  Synthetic construct
aaagacttgggcagattccag

SEQ ID NO: 2217 - DNA, 20 bp, Artificial Sequence
  Synthetic construct
agcaaagtgactcgcaccgt

SEQ ID NO: 2218 - DNA, 20 bp, Artificial Sequence
  Synthetic construct
gctccatgagcttccggaaa

SEQ ID NO: 2219 - DNA, 20 bp, Artificial Sequence
  Synthetic construct
tggtggagaggttgcggagt

SEQ ID NO: 2220 - DNA, 23 bp, Artificial Sequence
  Synthetic construct
acttgggcagattccaggtgtga

SEQ ID NO: 2221 - DNA, 20 bp, Artificial Sequence
  Synthetic construct
tgcacacacctcattgccag

SEQ ID NO: 2222 - DNA, 27 bp, Artificial Sequence
  Synthetic construct
aagatggctgcttggataacacctttc

SEQ ID NO: 2223 - DNA, 23 bp, Artificial Sequence
  Synthetic construct
acacacctcattgccagcaaagt

SEQ ID NO: 2224 - DNA, 24 bp, Artificial Sequence
  Synthetic construct
cctcctgcacactctacgattgcc

SEQ ID NO: 2225 - DNA, 20 bp, Artificial Sequence
  Synthetic construct
tgacgccagagtggctggaa

SEQ ID NO: 2226 - DNA, 27 bp, Artificial Sequence
  Synthetic construct
gagttctgcttgtgctccatgagcttc

SEQ ID NO: 2227 - DNA, 22 bp, Artificial Sequence
  Synthetic construct
tgcttcaggtgtcagaagttca

SEQ ID NO: 2228 - DNA, 21 bp, Artificial Sequence
  Synthetic construct
tctcggcataaatgaaggtca

SEQ ID NO: 2229 - DNA, 21 bp, Artificial Sequence
  Synthetic construct
tggaagaatgcttcaggtgtc

SEQ ID NO: 2230 - DNA, 20 bp, Artificial Sequence
  Synthetic construct
tctggcaaaatattctcggc

SEQ ID NO: 2231 - DNA, 21 bp, Artificial Sequence
  Synthetic construct
cacatagtgacgccagagtgg

SEQ ID NO: 2232 - DNA, 23 bp, Artificial Sequence
  Synthetic construct
aaatgaaggtcattttcacagga

SEQ ID NO: 2233 - DNA, 23 bp, Artificial Sequence
  Synthetic construct
agtggctggaagaatgcttcagg

SEQ ID NO: 2234 - DNA, 24 bp, Artificial Sequence
  Synthetic construct
cggcataaatgaaggtcattttca

SEQ ID NO: 2235 - DNA, 23 bp, Artificial Sequence
  Synthetic construct
tttctgtcgtgaagcacatagtg

SEQ ID NO: 2236 - DNA, 27 bp, Artificial Sequence
  Synthetic construct
gaaggtcattttcacaggatattaaaa

SEQ ID NO: 2237 - DNA, 27 bp, Artificial Sequence
  Synthetic construct
ggaagaatgcttcaggtgtcagaagtt

SEQ ID NO: 2238 - DNA, 26 bp, Artificial Sequence
  Synthetic construct
ctggcaaaatattctcggcataaatg

SEQ ID NO: 2239 - DNA, 19 bp, Artificial Sequence
  Synthetic construct
tgacggcgatttctgtcgt

SEQ ID NO: 2240 - DNA, 24 bp, Artificial Sequence
  Synthetic construct
ctatgcctctggcaaaatattctc

SEQ ID NO: 2241 - DNA, 20 bp, Artificial Sequence
  Synthetic construct
aagttcctgacggcgatttc

SEQ ID NO: 2242 - DNA, 21 bp, Artificial Sequence
  Synthetic construct
cgaactctgcattgtgaacat

SEQ ID NO: 2243 - DNA, 18 bp, Artificial Sequence
  Synthetic construct
ccgtgaagttcctgacgg

SEQ ID NO: 2244 - DNA, 22 bp, Artificial Sequence
  Synthetic construct
tcagaacgaactctgcattgtg

SEQ ID NO: 2245 - DNA, 20 bp, Artificial Sequence
  Synthetic construct
acgacgcagatagcatcagc

SEQ ID NO: 2246 - DNA, 21 bp, Artificial Sequence
  Synthetic construct
ttgcagtagtcctttccatgc

SEQ ID NO: 2247 - DNA, 20 bp, Artificial Sequence
  Synthetic construct
ccgcaatggagtctatggaa

SEQ ID NO: 2248 - DNA, 23 bp, Artificial Sequence
  Synthetic construct
ctctcccacacctgtctgtaaac

SEQ ID NO: 2249 - DNA, 23 bp, Artificial Sequence
  Synthetic construct
ctgaaaggaataggaaagccaag

SEQ ID NO: 2250 - DNA, 22 bp, Artificial Sequence
  Synthetic construct
tctgtaaactacggatggaccc

SEQ ID NO: 2251 - DNA, 24 bp, Artificial Sequence
  Synthetic construct
tccagaagagtattgatgatgtgg

SEQ ID NO: 2252 - DNA, 23 bp, Artificial Sequence
  Synthetic construct
caagttgaacccagtctttgaag

SEQ ID NO: 2253 - DNA, 22 bp, Artificial Sequence
  Synthetic construct
cctgttcaaaacctacccatcc

SEQ ID NO: 2254 - DNA, 21 bp, Artificial Sequence
  Synthetic construct
agtcctttccatgccagaatc

SEQ ID NO: 2255 - DNA, 21 bp, Artificial Sequence
  Synthetic construct
ctctacaagcagctccacagg

SEQ ID NO: 2256 - DNA, 23 bp, Artificial Sequence
  Synthetic construct
tgaagacgaaattgcagtagtcc

SEQ ID NO: 2257 - DNA, 20 bp, Artificial Sequence
  Synthetic construct
atcagcagcattgacagcac

SEQ ID NO: 2258 - DNA, 24 bp, Artificial Sequence
  Synthetic construct
aaaggtttatcaagttgaacccag

SEQ ID NO: 2259 - DNA, 22 bp, Artificial Sequence
  Synthetic construct
aaagccaagaaagttctccaaa

SEQ ID NO: 2260 - DNA, 20 bp, Artificial Sequence
  Synthetic construct
agaatctggtttccccatgc

SEQ ID NO: 2261 - DNA, 21 bp, Artificial Sequence
  Synthetic construct
cagatagcatcagcagcattg

SEQ ID NO: 2262 - DNA, 23 bp, Artificial Sequence
  Synthetic construct
cccagtctttgaagacgaaattg

SEQ ID NO: 2263 - DNA, 24 bp, Artificial Sequence
  Synthetic construct
acctacccatccagaagagtattg

SEQ ID NO: 2264 - DNA, 19 bp, Artificial Sequence
  Synthetic construct
gtttccccatgcagctctc

SEQ ID NO: 2265 - DNA, 25 bp, Artificial Sequence
  Synthetic construct
tccaaatttagtctctacaagcagc

SEQ ID NO: 2266 - DNA, 20 bp, Artificial Sequence
  Synthetic construct
ccatgccagaatctggtttc

SEQ ID NO: 2267 - DNA, 24 bp, Artificial Sequence
  Synthetic construct
ggaataggaaagccaagaaagttc

SEQ ID NO: 2268 - DNA, 20 bp, Artificial Sequence
  Synthetic construct
actacggatggacccggtat

SEQ ID NO: 2269 - DNA, 23 bp, Artificial Sequence
  Synthetic construct
ttgatgatgtggattcaaaactg

SEQ ID NO: 2270 - DNA, 24 bp, Artificial Sequence
  Synthetic construct
cacctgtctgtaaactacggatgg

SEQ ID NO: 2271 - DNA, 26 bp, Artificial Sequence
  Synthetic construct
tggagtctatggaatccttaagactc

SEQ ID NO: 2272 - DNA, 19 bp, Artificial Sequence
  Synthetic construct
atgcagctctcccacacct

SEQ ID NO: 2273 - DNA, 23 bp, Artificial Sequence
  Synthetic construct
aatgagcctgttcaaaacctacc

SEQ ID NO: 2274 - DNA, 24 bp, Artificial Sequence
  Synthetic construct
acgaaattgcagtagtcctttcca

SEQ ID NO: 2275 - DNA, 22 bp, Artificial Sequence
  Synthetic construct
caccacctgcacgacgcagata

SEQ ID NO: 2276 - DNA, 27 bp, Artificial Sequence
  Synthetic construct
gtcctttccatgccagaatctggtttc

SEQ ID NO: 2277 - DNA, 26 bp, Artificial Sequence
  Synthetic construct
gccaagaaagttctccaaatttagtc

SEQ ID NO: 2278 - DNA, 20 bp, Artificial Sequence
  Synthetic construct
actgcagaggcaatgtcatg

SEQ ID NO: 2279 - DNA, 19 bp, Artificial Sequence
  Synthetic construct
agcattgacagcacctcca

SEQ ID NO: 2280 - DNA, 19 bp, Artificial Sequence
  Synthetic construct
cgctggatgaagtgacgtg

SEQ ID NO: 2281 - DNA, 26 bp, Artificial Sequence
  Synthetic construct
aagagtattgatgatgtggattcaaa

SEQ ID NO: 2282 - DNA, 20 bp, Artificial Sequence
  Synthetic construct
ggcgtggagtacctgtcaat

SEQ ID NO: 2283 - DNA, 27 bp, Artificial Sequence
  Synthetic construct
atttagtctctacaagcagctccacag

SEQ ID NO: 2284 - DNA, 19 bp, Artificial Sequence
  Synthetic construct
aatgtcatgccagggcatc

SEQ ID NO: 2285 - DNA, 25 bp, Artificial Sequence
  Synthetic construct
tggattcaaaactgaaaggaatagg

SEQ ID NO: 2286 - DNA, 18 bp, Artificial Sequence
  Synthetic construct
atccggggcgtggagtac

SEQ ID NO: 2287 - DNA, 18 bp, Artificial Sequence
  Synthetic construct
cacaggcaccacctgcac

SEQ ID NO: 2288 - DNA, 18 bp, Artificial Sequence
  Synthetic construct
acgtgccacatcacgagc

SEQ ID NO: 2289 - DNA, 27 bp, Artificial Sequence
  Synthetic construct
aaagttctccaaatttagtctctacaa

SEQ ID NO: 2290 - DNA, 18 bp, Artificial Sequence
  Synthetic construct
ttcccgtggactgcagag

SEQ ID NO: 2291 - DNA, 24 bp, Artificial Sequence
  Synthetic construct
ttcaaaacctacccatccagaaga

SEQ ID NO: 2292 - DNA, 20 bp, Artificial Sequence
  Synthetic construct
agaggcaatgtcatgccagg

SEQ ID NO: 2293 - DNA, 26 bp, Artificial Sequence
  Synthetic construct
agataaaaatgagcctgttcaaaacc

SEQ ID NO: 2294 - DNA, 18 bp, Artificial Sequence
  Synthetic construct
catcacgagccgccttcc

SEQ ID NO: 2295 - DNA, 24 bp, Artificial Sequence
  Synthetic construct
aatggctcaaactaaggacaagag

SEQ ID NO: 2296 - DNA, 22 bp, Artificial Sequence
  Synthetic construct
tcacgaccatagtgcttctcag

SEQ ID NO: 2297 - DNA, 27 bp, Artificial Sequence
  Synthetic construct
aaaagactagcaagtagttcttcaatc

SEQ ID NO: 2298 - DNA, 25 bp, Artificial Sequence
  Synthetic construct
tgagtacaatagcttgcagataaaa

SEQ ID NO: 2299 - DNA, 24 bp, Artificial Sequence
  Synthetic construct
agcttcaacttcagatgaacattt

SEQ ID NO: 2300 - DNA, 20 bp, Artificial Sequence
  Synthetic construct
gagtcgccatctacctggtc

SEQ ID NO: 2301 - DNA, 20 bp, Artificial Sequence
  Synthetic construct
tcctcacacactccatgctc

SEQ ID NO: 2302 - DNA, 20 bp, Artificial Sequence
  Synthetic construct
cccagctctgctggacataa

SEQ ID NO: 2303 - DNA, 23 bp, Artificial Sequence
  Synthetic construct
gctggacataagctggttaacag

SEQ ID NO: 2304 - DNA, 20 bp, Artificial Sequence
  Synthetic construct
ctctgagcgccgaactctct

SEQ ID NO: 2305 - DNA, 27 bp, Artificial Sequence
  Synthetic construct
ggacataagctggttaacagagagcct

SEQ ID NO: 2306 - DNA, 20 bp, Artificial Sequence
  Synthetic construct
agcgccgaactctctccacc

SEQ ID NO: 2307 - DNA, 18 bp, Artificial Sequence
  Synthetic construct
caggatggcagctgctcc

SEQ ID NO: 2308 - DNA, 20 bp, Artificial Sequence
  Synthetic construct
tccacctcctcacacactcc

SEQ ID NO: 2309 - DNA, 18 bp, Artificial Sequence
  Synthetic construct
aggagcgcaggatggcag

SEQ ID NO: 2310 - DNA, 20 bp, Artificial Sequence
  Synthetic construct
actccatgctccagcagctc

SEQ ID NO: 2311 - DNA, 18 bp, Artificial Sequence
  Synthetic construct
agctgctcccccgggttg

SEQ ID NO: 2312 - DNA, 23 bp, Artificial Sequence
  Synthetic construct
tcacacactccatgctccagcag

SEQ ID NO: 2313 - DNA, 18 bp, Artificial Sequence
  Synthetic construct
agagagcctgggagctgg

SEQ ID NO: 2314 - DNA, 23 bp, Artificial Sequence
  Synthetic construct
cttcatggtctggtacctctctg

SEQ ID NO: 2315 - DNA, 18 bp, Artificial Sequence
  Synthetic construct
tgtacctgtggagtgccg

SEQ ID NO: 2316 - DNA, 18 bp, Artificial Sequence
  Synthetic construct
gtcctggtggtgctggag

SEQ ID NO: 2317 - DNA, 21 bp, Artificial Sequence
  Synthetic construct
gttaacagagagcctgggagc

SEQ ID NO: 2318 - DNA, 20 bp, Artificial Sequence
  Synthetic construct
tctggtacctctctgagcgc

SEQ ID NO: 2319 - DNA, 20 bp, Artificial Sequence
  Synthetic construct
cagcctgtacctgtggagtg

SEQ ID NO: 2320 - DNA, 19 bp, Artificial Sequence
  Synthetic construct
agggcatctacatcggacc

SEQ ID NO: 2321 - DNA, 19 bp, Artificial Sequence
  Synthetic construct
ggagctgggcagcctgtac

SEQ ID NO: 2322 - DNA, 20 bp, Artificial Sequence
  Synthetic construct
tacctctctgagcgccgaac

SEQ ID NO: 2323 - DNA, 19 bp, Artificial Sequence
  Synthetic construct
ctgggcagcctgtacctgt

SEQ ID NO: 2324 - DNA, 20 bp, Artificial Sequence
  Synthetic construct
ctacatcggaccgcaggact

SEQ ID NO: 2325 - DNA, 18 bp, Artificial Sequence
  Synthetic construct
agaggaggccgtcagctg

SEQ ID NO: 2326 - DNA, 18 bp, Artificial Sequence
  Synthetic construct
ggtgctcaggtcctggtg

SEQ ID NO: 2327 - DNA, 18 bp, Artificial Sequence
  Synthetic construct
gccgtcagctggcaggag

SEQ ID NO: 2328 - DNA, 20 bp, Artificial Sequence
  Synthetic construct
gctcaggtcctggtggtgct

SEQ ID NO: 2329 - DNA, 20 bp, Artificial Sequence
  Synthetic construct
tgacagctacaacgagggtg

SEQ ID NO: 2330 - DNA, 20 bp, Artificial Sequence
  Synthetic construct
gatgacagctttcaccaggc

SEQ ID NO: 2331 - DNA, 20 bp, Artificial Sequence
  Synthetic construct
tgacagctacaacgagggtg

SEQ ID NO: 2332 - DNA, 19 bp, Artificial Sequence
  Synthetic construct
agctccaccaaagaaaccg

SEQ ID NO: 2333 - DNA, 21 bp, Artificial Sequence
  Synthetic construct
ccgtcacattctcgtacacct

SEQ ID NO: 2334 - DNA, 19 bp, Artificial Sequence
  Synthetic construct
gtcatctgggaagccttgc

SEQ ID NO: 2335 - DNA, 23 bp, Artificial Sequence
  Synthetic construct
ctcgtacaccttatcattcgacc

SEQ ID NO: 2336 - DNA, 20 bp, Artificial Sequence
  Synthetic construct
cctgctgacagctacaacga

SEQ ID NO: 2337 - DNA, 22 bp, Artificial Sequence
  Synthetic construct
tagggacatactcctctggtgg

SEQ ID NO: 2338 - DNA, 18 bp, Artificial Sequence
  Synthetic construct
accaaagaaaccgcctcg

SEQ ID NO: 2339 - DNA, 22 bp, Artificial Sequence
  Synthetic construct
tactggacatctcgatgacagc

SEQ ID NO: 2340 - DNA, 20 bp, Artificial Sequence
  Synthetic construct
atcctgcagctccaccaaag

SEQ ID NO: 2341 - DNA, 24 bp, Artificial Sequence
  Synthetic construct
cttcaccatagggacatactcctc

SEQ ID NO: 2342 - DNA, 20 bp, Artificial Sequence
  Synthetic construct
gctacaacgagggtgtcaag

SEQ ID NO: 2343 - DNA, 20 bp, Artificial Sequence
  Synthetic construct
gctggctggattttactgga

SEQ ID NO: 2344 - DNA, 18 bp, Artificial Sequence
  Synthetic construct
aagccttgccagcctcag

SEQ ID NO: 2345 - DNA, 26 bp, Artificial Sequence
  Synthetic construct
tcacattctcgtacaccttatcattc

SEQ ID NO: 2346 - DNA, 18 bp, Artificial Sequence
  Synthetic construct
gagctcccggtcatctgg

SEQ ID NO: 2347 - DNA, 23 bp, Artificial Sequence
  Synthetic construct
gctggattttactggacatctcg

SEQ ID NO: 2348 - DNA, 19 bp, Artificial Sequence
  Synthetic construct
aagaaaccgcctcgccctg

SEQ ID NO: 2349 - DNA, 24 bp, Artificial Sequence
  Synthetic construct
ggacatctcgatgacagctttcac

SEQ ID NO: 2350 - DNA, 20 bp, Artificial Sequence
  Synthetic construct
ctcccggtcatctgggaagc

SEQ ID NO: 2351 - DNA, 20 bp, Artificial Sequence
  Synthetic construct
tactcctctggtggggctgg

SEQ ID NO: 2352 - DNA, 20 bp, Artificial Sequence
  Synthetic construct
ttgccagcctcagcagccct

SEQ ID NO: 2353 - DNA, 21 bp, Artificial Sequence
  Synthetic construct
tttcaccaggcccgtcacatt

SEQ ID NO: 2354 - DNA, 20 bp, Artificial Sequence
  Synthetic construct
ctgggaagccttgccagcct

SEQ ID NO: 2355 - DNA, 20 bp, Artificial Sequence
  Synthetic construct
caggcccgtcacattctcgt

SEQ ID NO: 2356 - DNA, 18 bp, Artificial Sequence
  Synthetic construct
cctcgccctggagctccc

SEQ ID NO: 2357 - DNA, 22 bp, Artificial Sequence
  Synthetic construct
accttatcattcgaccggtcca

SEQ ID NO: 2358 - DNA, 20 bp, Artificial Sequence
  Synthetic construct
gcagccctgctgacagctac

SEQ ID NO: 2359 - DNA, 20 bp, Artificial Sequence
  Synthetic construct
gtggggctggctggatttta

SEQ ID NO: 2360 - DNA, 25 bp, Artificial Sequence
  Synthetic construct
ttggaaaccaacatatatatcagcc

SEQ ID NO: 2361 - DNA, 20 bp, Artificial Sequence
  Synthetic construct
gtccaggttggcagtaggag

SEQ ID NO: 2362 - DNA, 22 bp, Artificial Sequence
  Synthetic construct
tatcagcctgtgggtaaaccag

SEQ ID NO: 2363 - DNA, 20 bp, Artificial Sequence
  Synthetic construct
ctgatttcctggggctgaag

SEQ ID NO: 2364 - DNA, 27 bp, Artificial Sequence
  Synthetic construct
aaccaacatatatatcagcctgtgggt

SEQ ID NO: 2365 - DNA, 20 bp, Artificial Sequence
  Synthetic construct
attcgaccggtccaggttgg

SEQ ID NO: 2366 - DNA, 20 bp, Artificial Sequence
  Synthetic construct
gagggattgggcaagtgttg

SEQ ID NO: 2367 - DNA, 18 bp, Artificial Sequence
  Synthetic construct
gggggctgatttcctggg

SEQ ID NO: 2368 - DNA, 27 bp, Artificial Sequence
  Synthetic construct
gctgacagctacaacgagggtgtcaag

SEQ ID NO: 2369 - DNA, 20 bp, Artificial Sequence
  Synthetic construct
cgtgctcctaggggaggctc

SEQ ID NO: 2370 - DNA, 20 bp, Artificial Sequence
  Synthetic construct
atggaagtcttcagggtccg

SEQ ID NO: 2371 - DNA, 23 bp, Artificial Sequence
  Synthetic construct
agttcaatagcttctgtgccatc

SEQ ID NO: 2372 - DNA, 21 bp, Artificial Sequence
  Synthetic construct
gaaatggaagaagatcagcgc

SEQ ID NO: 2373 - DNA, 21 bp, Artificial Sequence
  Synthetic construct
aataatgtcctcagggccaag

SEQ ID NO: 2374 - DNA, 22 bp, Artificial Sequence
  Synthetic construct
gtattgacagggaggatggaag

SEQ ID NO: 2375 - DNA, 24 bp, Artificial Sequence
  Synthetic construct
ggtcagagttcaatagcttctgtg

SEQ ID NO: 2376 - DNA, 20 bp, Artificial Sequence
  Synthetic construct
gctggctggaaaaagaggaa

SEQ ID NO: 2377 - DNA, 20 bp, Artificial Sequence
  Synthetic construct
tggccaataatgtcctcagg

SEQ ID NO: 2378 - DNA, 21 bp, Artificial Sequence
  Synthetic construct
agggaggatggaagtcttcag

SEQ ID NO: 2379 - DNA, 21 bp, Artificial Sequence
  Synthetic construct
agctcacccaggtcagagttc

SEQ ID NO: 2380 - DNA, 20 bp, Artificial Sequence
  Synthetic construct
aagatcagcgctggctggaa

SEQ ID NO: 2381 - DNA, 20 bp, Artificial Sequence
  Synthetic construct
ctcagggccaagccgacttc

SEQ ID NO: 2382 - DNA, 22 bp, Artificial Sequence
  Synthetic construct
tctctcgaggcagtattgacag

SEQ ID NO: 2383 - DNA, 23 bp, Artificial Sequence
  Synthetic construct
cacccaggtcagagttcaatagc

SEQ ID NO: 2384 - DNA, 23 bp, Artificial Sequence
  Synthetic construct
caacaggaaatggaagaagatca

SEQ ID NO: 2385 - DNA, 20 bp, Artificial Sequence
  Synthetic construct
cacagtggccaataatgtcc

SEQ ID NO: 2386 - DNA, 20 bp, Artificial Sequence
  Synthetic construct
aggcagtattgacagggagg

SEQ ID NO: 2387 - DNA, 22 bp, Artificial Sequence
  Synthetic construct
tcatcttgttgatgagctcacc

SEQ ID NO: 2388 - DNA, 19 bp, Artificial Sequence
  Synthetic construct
cgacagcaacaggaaatgg

SEQ ID NO: 2389 - DNA, 21 bp, Artificial Sequence
  Synthetic construct
ggaatggtctcatccacagtg

SEQ ID NO: 2390 - DNA, 23 bp, Artificial Sequence
  Synthetic construct
tgagactctctcgaggcagtatt

SEQ ID NO: 2391 - DNA, 20 bp, Artificial Sequence
  Synthetic construct
ttgatgagctcacccaggtc

SEQ ID NO: 2392 - DNA, 20 bp, Artificial Sequence
  Synthetic construct
cgtctaatccgacagcaaca

SEQ ID NO: 2393 - DNA, 20 bp, Artificial Sequence
  Synthetic construct
tcatccacagtggccaataa

SEQ ID NO: 2394 - DNA, 23 bp, Artificial Sequence
  Synthetic construct
atcagcgctggctggaaaaagag

SEQ ID NO: 2395 - DNA, 27 bp, Artificial Sequence
  Synthetic construct
atccacagtggccaataatgtcctcag

SEQ ID NO: 2396 - DNA, 24 bp, Artificial Sequence
  Synthetic construct
atggaagaagatcagcgctggctg

SEQ ID NO: 2397 - DNA, 24 bp, Artificial Sequence
  Synthetic construct
atggtctcatccacagtggccaat

SEQ ID NO: 2398 - DNA, 23 bp, Artificial Sequence
  Synthetic construct
ctaatccgacagcaacaggaaat

SEQ ID NO: 2399 - DNA, 20 bp, Artificial Sequence
  Synthetic construct
aggaggggaatggtctcatc

SEQ ID NO: 2400 - DNA, 23 bp, Artificial Sequence
  Synthetic construct
acctgatgtgagactctctcgag

SEQ ID NO: 2401 - DNA, 20 bp, Artificial Sequence
  Synthetic construct
gctggtaggaggggaatggt

SEQ ID NO: 2402 - DNA, 27 bp, Artificial Sequence
  Synthetic construct
gctgacagctacaacgagggtgtcaag

SEQ ID NO: 2403 - DNA, 21 bp, Artificial Sequence
  Synthetic construct
tttcaccaggcccgtcacatt

SEQ ID NO: 2404 - DNA, 22 bp, Artificial Sequence
  Synthetic construct
gactcctcatccattgaagacc

SEQ ID NO: 2405 - DNA, 22 bp, Artificial Sequence
  Synthetic construct
ccaagccatactttgcatcttt

SEQ ID NO: 2406 - DNA, 25 bp, Artificial Sequence
  Synthetic construct
ctgttgcgagtttaaatagaagtcc

SEQ ID NO: 2407 - DNA, 24 bp, Artificial Sequence
  Synthetic construct
ccctttctggtgaagatactatgc

SEQ ID NO: 2408 - DNA, 22 bp, Artificial Sequence
  Synthetic construct
agtcctgaaaggaggaaacatg

SEQ ID NO: 2409 - DNA, 23 bp, Artificial Sequence
  Synthetic construct
caggttcactaaggtgatctccc

SEQ ID NO: 2410 - DNA, 24 bp, Artificial Sequence
  Synthetic construct
ttcaaagtctgttgcgagtttaaa

SEQ ID NO: 2411 - DNA, 22 bp, Artificial Sequence
  Synthetic construct
gtgatctccctttctggtgaag

SEQ ID NO: 2412 - DNA, 23 bp, Artificial Sequence
  Synthetic construct
ggaggaaacatgaatcagactcc

SEQ ID NO: 2413 - DNA, 24 bp, Artificial Sequence
  Synthetic construct
tcactaaggtgatctccctttctg

SEQ ID NO: 2414 - DNA, 27 bp, Artificial Sequence
  Synthetic construct
taaatagaagtcctgaaaggaggaaac

SEQ ID NO: 2415 - DNA, 27 bp, Artificial Sequence
  Synthetic construct
gaagatactatgctccatcttttgtgt

SEQ ID NO: 2416 - DNA, 22 bp, Artificial Sequence
  Synthetic construct
cctgggcaagcatatgttctag

SEQ ID NO: 2417 - DNA, 20 bp, Artificial Sequence
  Synthetic construct
aagcatccatccaagtcagc

SEQ ID NO: 2418 - DNA, 22 bp, Artificial Sequence
  Synthetic construct
catgaatcagactcctcatcca

SEQ ID NO: 2419 - DNA, 21 bp, Artificial Sequence
  Synthetic construct
tccagtcttcccatcttctcc

SEQ ID NO: 2420 - DNA, 19 bp, Artificial Sequence
  Synthetic construct
attgaagaccctgggcaag

SEQ ID NO: 2421 - DNA, 24 bp, Artificial Sequence
  Synthetic construct
gggcaactgaactgataaatatgc

SEQ ID NO: 2422 - DNA, 20 bp, Artificial Sequence
  Synthetic construct
catccattgaagaccctggg

SEQ ID NO: 2423 - DNA, 20 bp, Artificial Sequence
  Synthetic construct
ccatcttctccccaccaata

SEQ ID NO: 2424 - DNA, 20 bp, Artificial Sequence
  Synthetic construct
aagaccctgggcaagcatat

SEQ ID NO: 2425 - DNA, 20 bp, Artificial Sequence
  Synthetic construct
ctggcttcaagcatccatcc

SEQ ID NO: 2426 - DNA, 27 bp, Artificial Sequence
  Synthetic construct
tgaatcagactcctcatccattgaaga

SEQ ID NO: 2427 - DNA, 22 bp, Artificial Sequence
  Synthetic construct
atccatccaagtcagctggtcc

SEQ ID NO: 2428 - DNA, 20 bp, Artificial Sequence
  Synthetic construct
acaaaccgttgcagagttgg

SEQ ID NO: 2429 - DNA, 23 bp, Artificial Sequence
  Synthetic construct
aatatgcctaggtccagtcttcc

SEQ ID NO: 2430 - DNA, 23 bp, Artificial Sequence
  Synthetic construct
ccttctcaccagatgtcaagatc

SEQ ID NO: 2431 - DNA, 25 bp, Artificial Sequence
  Synthetic construct
tgaactgataaatatgcctaggtcc

SEQ ID NO: 2432 - DNA, 20 bp, Artificial Sequence
  Synthetic construct
gatgcagaatctttggcagg

SEQ ID NO: 2433 - DNA, 20 bp, Artificial Sequence
  Synthetic construct
aagtcagctggtcctccagg

SEQ ID NO: 2434 - DNA, 22 bp, Artificial Sequence
  Synthetic construct
cctctctctatccacatcggaa

SEQ ID NO: 2435 - DNA, 22 bp, Artificial Sequence
  Synthetic construct
tccccaccaataatttgaaatc

SEQ ID NO: 2436 - DNA, 23 bp, Artificial Sequence
  Synthetic construct
agatctgatgcagaatctttggc

SEQ ID NO: 2437 - DNA, 23 bp, Artificial Sequence
  Synthetic construct
cctaggtccagtcttcccatctt

SEQ ID NO: 2438 - DNA, 20 bp, Artificial Sequence
  Synthetic construct
gcagagttggtgggaaaacc

SEQ ID NO: 2439 - DNA, 20 bp, Artificial Sequence
  Synthetic construct
tccaggggcaactgaactga

SEQ ID NO: 2440 - DNA, 22 bp, Artificial Sequence
  Synthetic construct
tgtcattgttaacatggaaccc

SEQ ID NO: 2441 - DNA, 24 bp, Artificial Sequence
  Synthetic construct
atcttctccccaccaataatttga

SEQ ID NO: 2442 - DNA, 24 bp, Artificial Sequence
  Synthetic construct
tcaccagatgtcaagatctgatgc

SEQ ID NO: 2443 - DNA, 20 bp, Artificial Sequence
  Synthetic construct
ctggtcctccaggggcaact

SEQ ID NO: 2444 - DNA, 24 bp, Artificial Sequence
  Synthetic construct
tgcagaatctttggcaggagtgac

SEQ ID NO: 2445 - DNA, 24 bp, Artificial Sequence
  Synthetic construct
ggcttcaagcatccatccaagtca

SEQ ID NO: 2446 - DNA, 26 bp, Artificial Sequence
  Synthetic construct
cagagttggtgggaaaaccttctcac

SEQ ID NO: 2447 - DNA, 27 bp, Artificial Sequence
  Synthetic construct
cctccaggggcaactgaactgataaat

SEQ ID NO: 2448 - DNA, 22 bp, Artificial Sequence
  Synthetic construct
tggcaggagtgacaaaacttaa

SEQ ID NO: 2449 - DNA, 25 bp, Artificial Sequence
  Synthetic construct
cacactattcacagatatcaaacgg

SEQ ID NO: 2450 - DNA, 24 bp, Artificial Sequence
  Synthetic construct
gatgtcaagatctgatgcagaatc

SEQ ID NO: 2451 - DNA, 23 bp, Artificial Sequence
  Synthetic construct
ccctccagactcacactattcac

SEQ ID NO: 2452 - DNA, 23 bp, Artificial Sequence
  Synthetic construct
ggaaaaccttctcaccagatgtc

SEQ ID NO: 2453 - DNA, 27 bp, Artificial Sequence
  Synthetic construct
tccagactcacactattcacagatatc

SEQ ID NO: 2454 - DNA, 27 bp, Artificial Sequence
  Synthetic construct
gaatctttggcaggagtgacaaaactt

SEQ ID NO: 2455 - DNA, 20 bp, Artificial Sequence
  Synthetic construct
attgcagcatggtggctgac

SEQ ID NO: 2456 - DNA, 20 bp, Artificial Sequence
  Synthetic construct
ccaccacaaaccgttgcaga

SEQ ID NO: 2457 - DNA, 20 bp, Artificial Sequence
  Synthetic construct
tggctgactccctccagact

SEQ ID NO: 2458 - DNA, 20 bp, Artificial Sequence
  Synthetic construct
ccgttgcagagttggtggga

SEQ ID NO: 2459 - DNA, 20 bp, Artificial Sequence
  Synthetic construct
agcatggtggctgactccct

SEQ ID NO: 2460 - DNA, 18 bp, Artificial Sequence
  Synthetic construct
gaacccccaccacaaacc

SEQ ID NO: 2461 - DNA, 23 bp, Artificial Sequence
  Synthetic construct
ctgactccctccagactcacact

SEQ ID NO: 2462 - DNA, 21 bp, Artificial Sequence
  Synthetic construct
gcctcaagtccaaggctttat

SEQ ID NO: 2463 - DNA, 20 bp, Artificial Sequence
  Synthetic construct
cagtttccaagtgcattccc

SEQ ID NO: 2464 - DNA, 23 bp, Artificial Sequence
  Synthetic construct
gttggttatggtgttagtgaggg

SEQ ID NO: 2465 - DNA, 21 bp, Artificial Sequence
  Synthetic construct
gcctcaagtccaaggctttat

SEQ ID NO: 2466 - DNA, 23 bp, Artificial Sequence
  Synthetic construct
gcgtggaagcttatttagtgatc

SEQ ID NO: 2467 - DNA, 24 bp, Artificial Sequence
  Synthetic construct
tggttcatatcatgaagatgttgg

SEQ ID NO: 2468 - DNA, 24 bp, Artificial Sequence
  Synthetic construct
tgatctcaggtagtctttgtccag

SEQ ID NO: 2469 - DNA, 22 bp, Artificial Sequence
  Synthetic construct
gtgttagtgagggcctcaagtc

SEQ ID NO: 2470 - DNA, 24 bp, Artificial Sequence
  Synthetic construct
gtccagaatacagtttccaagtgc

SEQ ID NO: 2471 - DNA, 23 bp, Artificial Sequence
  Synthetic construct
tcatgaagatgttggttatggtg

SEQ ID NO: 2472 - DNA, 26 bp, Artificial Sequence
  Synthetic construct
tcaggtagtctttgtccagaatacag

SEQ ID NO: 2473 - DNA, 20 bp, Artificial Sequence
  Synthetic construct
tgagggcctcaagtccaagg

SEQ ID NO: 2474 - DNA, 27 bp, Artificial Sequence
  Synthetic construct
agtctttgtccagaatacagtttccaa

SEQ ID NO: 2475 - DNA, 27 bp, Artificial Sequence
  Synthetic construct
ggttatggtgttagtgagggcctcaag

SEQ ID NO: 2476 - DNA, 27 bp, Artificial Sequence
  Synthetic construct
aatacagtttccaagtgcattcccaaa

SEQ ID NO: 2477 - DNA, 23 bp, Artificial Sequence
  Synthetic construct
caaggctttatctttggagaagg

SEQ ID NO: 2478 - DNA, 20 bp, Artificial Sequence
  Synthetic construct
ggcagctgttgtatcttgcc

SEQ ID NO: 2479 - DNA, 19 bp, Artificial Sequence
  Synthetic construct
agaaggcaaggaaggaggc

SEQ ID NO: 2480 - DNA, 21 bp, Artificial Sequence
  Synthetic construct
tccacagacggttcaagatct

SEQ ID NO: 2481 - DNA, 19 bp, Artificial Sequence
  Synthetic construct
gtgacagacgggctgaagc

SEQ ID NO: 2482 - DNA, 21 bp, Artificial Sequence
  Synthetic construct
tgtatcttgcctcctccacag

SEQ ID NO: 2483 - DNA, 23 bp, Artificial Sequence
  Synthetic construct
caagtccaaggctttatctttgg

SEQ ID NO: 2484 - DNA, 23 bp, Artificial Sequence
  Synthetic construct
agctgttgtatcttgcctcctcc

SEQ ID NO: 2485 - DNA, 20 bp, Artificial Sequence
  Synthetic construct
aaggaaggaggcggtgacag

SEQ ID NO: 2486 - DNA, 20 bp, Artificial Sequence
  Synthetic construct
atgttcggtcggcagctgtt

SEQ ID NO: 2487 - DNA, 18 bp, Artificial Sequence
  Synthetic construct
gctgaagcgagccctcag

SEQ ID NO: 2488 - DNA, 19 bp, Artificial Sequence
  Synthetic construct
cggtatcacagcatggctg

SEQ ID NO: 2489 - DNA, 19 bp, Artificial Sequence
  Synthetic construct
agacgggctgaagcgagcc

SEQ ID NO: 2490 - DNA, 20 bp, Artificial Sequence
  Synthetic construct
tgggtctggaaggggaggtc

SEQ ID NO: 2491 - DNA, 19 bp, Artificial Sequence
  Synthetic construct
aggcggtgacagacgggct

SEQ ID NO: 2492 - DNA, 20 bp, Artificial Sequence
  Synthetic construct
agcatggctgggtctggaag

SEQ ID NO: 2493 - DNA, 20 bp, Artificial Sequence
  Synthetic construct
atttgtgagggtccagctga

SEQ ID NO: 2494 - DNA, 23 bp, Artificial Sequence
  Synthetic construct
gttaaatccacttcaagaggcaa

SEQ ID NO: 2495 - DNA, 21 bp, Artificial Sequence
  Synthetic construct
gagtctgtgcatttgtgaggg

SEQ ID NO: 2496 - DNA, 26 bp, Artificial Sequence
  Synthetic construct
cttgtctcttcgctttagttaaatcc

SEQ ID NO: 2497 - DNA, 20 bp, Artificial Sequence
  Synthetic construct
acgtgggagtctgtgcattt

SEQ ID NO: 2498 - DNA, 25 bp, Artificial Sequence
  Synthetic construct
tcgctttagttaaatccacttcaag

SEQ ID NO: 2499 - DNA, 22 bp, Artificial Sequence
  Synthetic construct
agttctacgtgggagtctgtgc

SEQ ID NO: 2500 - DNA, 23 bp, Artificial Sequence
  Synthetic construct
ggttcaagatcttgtctcttcgc

SEQ ID NO: 2501 - DNA, 23 bp, Artificial Sequence
  Synthetic construct
ctgtgcatttgtgagggtccagc

SEQ ID NO: 2502 - DNA, 20 bp, Artificial Sequence
  Synthetic construct
tgcctcctccacagacggtt

SEQ ID NO: 2503 - DNA, 20 bp, Artificial Sequence
  Synthetic construct
aatggcaagttctacgtggg

SEQ ID NO: 2504 - DNA, 27 bp, Artificial Sequence
  Synthetic construct
tcaagatcttgtctcttcgctttagtt

SEQ ID NO: 2505 - DNA, 22 bp, Artificial Sequence
  Synthetic construct
gatcagtgggtggtaggagaag

SEQ ID NO: 2506 - DNA, 18 bp, Artificial Sequence
  Synthetic construct
agctgtgggtgtcccagg

SEQ ID NO: 2507 - DNA, 21 bp, Artificial Sequence
  Synthetic construct
cggaaggatcagtgggtggta

SEQ ID NO: 2508 - DNA, 18 bp, Artificial Sequence
  Synthetic construct
agggccatgttcggtcgg

SEQ ID NO: 2509 - DNA, 20 bp, Artificial Sequence
  Synthetic construct
atggagtagacctgctgccc

SEQ ID NO: 2510 - DNA, 19 bp, Artificial Sequence
  Synthetic construct
gtgtcccagggccatgttc

SEQ ID NO: 2511 - DNA, 18 bp, Artificial Sequence
  Synthetic construct
ctgcccggaaggatcagt

SEQ ID NO: 2512 - DNA, 18 bp, Artificial Sequence
  Synthetic construct
gctgcagctgtgggtgtc

SEQ ID NO: 2513 - DNA, 23 bp, Artificial Sequence
  Synthetic construct
caagtccaaggctttatctttgg

SEQ ID NO: 2514 - DNA, 24 bp, Artificial Sequence
  Synthetic construct
tgatctcaggtagtctttgtccag

SEQ ID NO: 2515 - DNA, 23 bp, Artificial Sequence
  Synthetic construct
caaggctttatctttggagaagg

SEQ ID NO: 2516 - DNA, 26 bp, Artificial Sequence
  Synthetic construct
tcaggtagtctttgtccagaatacag

SEQ ID NO: 2517 - DNA, 19 bp, Artificial Sequence
  Synthetic construct
gtgacagacgggctgaagc

SEQ ID NO: 2518 - DNA, 23 bp, Artificial Sequence
  Synthetic construct
gttaaatccacttcaagaggcaa

SEQ ID NO: 2519 - DNA, 18 bp, Artificial Sequence
  Synthetic construct
gctgaagcgagccctcag

SEQ ID NO: 2520 - DNA, 25 bp, Artificial Sequence
  Synthetic construct
tcgctttagttaaatccacttcaag

SEQ ID NO: 2521 - DNA, 18 bp, Artificial Sequence
  Synthetic construct
aggaggcggtgacagacg

SEQ ID NO: 2522 - DNA, 25 bp, Artificial Sequence
  Synthetic construct
tgtctcttcgctttagttaaatcca

SEQ ID NO: 2523 - DNA, 18 bp, Artificial Sequence
  Synthetic construct
gacgggctgaagcgagcc

SEQ ID NO: 2524 - DNA, 24 bp, Artificial Sequence
  Synthetic construct
acggttcaagatcttgtctcttcg

SEQ ID NO: 2525 - DNA, 20 bp, Artificial Sequence
  Synthetic construct
gaacactgccatgtggtgac

SEQ ID NO: 2526 - DNA, 20 bp, Artificial Sequence
  Synthetic construct
catagcttgcttcagtgcca

SEQ ID NO: 2527 - DNA, 20 bp, Artificial Sequence
  Synthetic construct
agattgcagatgagaacggg

SEQ ID NO: 2528 - DNA, 20 bp, Artificial Sequence
  Synthetic construct
catagcttgcttcagtgcca

SEQ ID NO: 2529 - DNA, 20 bp, Artificial Sequence
  Synthetic construct
gaacactgccatgtggtgac

SEQ ID NO: 2530 - DNA, 20 bp, Artificial Sequence
  Synthetic construct
tattttgtagcccagctccg

SEQ ID NO: 2531 - DNA, 21 bp, Artificial Sequence
  Synthetic construct
actcccgaaacctggaatatg

SEQ ID NO: 2532 - DNA, 19 bp, Artificial Sequence
  Synthetic construct
cttcagtgccacagcaacc

SEQ ID NO: 2533 - DNA, 20 bp, Artificial Sequence
  Synthetic construct
tgaccaccaccactcacaag

SEQ ID NO: 2534 - DNA, 20 bp, Artificial Sequence
  Synthetic construct
tcagacagagccctgcagtt

SEQ ID NO: 2535 - DNA, 20 bp, Artificial Sequence
  Synthetic construct
gtatctcatggcggacatgg

SEQ ID NO: 2536 - DNA, 25 bp, Artificial Sequence
  Synthetic construct
tttaaattccagagtcatagcttgc

SEQ ID NO: 2537 - DNA, 22 bp, Artificial Sequence
  Synthetic construct
gctacggaagattgcagatgag

SEQ ID NO: 2538 - DNA, 26 bp, Artificial Sequence
  Synthetic construct
cctggtgttgataaactttaaattcc

SEQ ID NO: 2539 - DNA, 20 bp, Artificial Sequence
  Synthetic construct
cccatttgaacactgccatg

SEQ ID NO: 2540 - DNA, 22 bp, Artificial Sequence
  Synthetic construct
tgtgactattttgtagcccagc

SEQ ID NO: 2541 - DNA, 20 bp, Artificial Sequence
  Synthetic construct
atgagaacggggcgtatctc

SEQ ID NO: 2542 - DNA, 23 bp, Artificial Sequence
  Synthetic construct
ccagagtcatagcttgcttcagt

SEQ ID NO: 2543 - DNA, 23 bp, Artificial Sequence
  Synthetic construct
tggcatgatcttctacaggaaag

SEQ ID NO: 2544 - DNA, 19 bp, Artificial Sequence
  Synthetic construct
gtagcccagctccgtcagg

SEQ ID NO: 2545 - DNA, 19 bp, Artificial Sequence
  Synthetic construct
gacatggctcacatcagcg

SEQ ID NO: 2546 - DNA, 20 bp, Artificial Sequence
  Synthetic construct
gtcagggcctcagacagagc

SEQ ID NO: 2547 - DNA, 20 bp, Artificial Sequence
  Synthetic construct
caccactcacaagaccctgc

SEQ ID NO: 2548 - DNA, 19 bp, Artificial Sequence
  Synthetic construct
cagttggccaccacctggt

SEQ ID NO: 2549 - DNA, 20 bp, Artificial Sequence
  Synthetic construct
aatatgcccggctacggaag

SEQ ID NO: 2550 - DNA, 22 bp, Artificial Sequence
  Synthetic construct
ccaccacctggtgttgataaac

SEQ ID NO: 2551 - DNA, 20 bp, Artificial Sequence
  Synthetic construct
tgccctccccatttgaacac

SEQ ID NO: 2552 - DNA, 27 bp, Artificial Sequence
  Synthetic construct
gactattttgtagcccagctccgtcag

SEQ ID NO: 2553 - DNA, 20 bp, Artificial Sequence
  Synthetic construct
ctgctactcccgaaacctgg

SEQ ID NO: 2554 - DNA, 18 bp, Artificial Sequence
  Synthetic construct
agccctgcagttggccac

SEQ ID NO: 2555 - DNA, 20 bp, Artificial Sequence
  Synthetic construct
aacggggcgtatctcatggc

SEQ ID NO: 2556 - DNA, 23 bp, Artificial Sequence
  Synthetic construct
agcttgcttcagtgccacagcaa

SEQ ID NO: 2557 - DNA, 20 bp, Artificial Sequence
  Synthetic construct
tgccgagctggcatgatctt

SEQ ID NO: 2558 - DNA, 20 bp, Artificial Sequence
  Synthetic construct
gctccgtcagggcctcagac

SEQ ID NO: 2559 - DNA, 20 bp, Artificial Sequence
  Synthetic construct
atggcggacatggctcacat

SEQ ID NO: 2560 - DNA, 27 bp, Artificial Sequence
  Synthetic construct
gagtcatagcttgcttcagtgccacag

SEQ ID NO: 2561 - DNA, 23 bp, Artificial Sequence
  Synthetic construct
ttgcagatgagaacggggcgtat

SEQ ID NO: 2562 - DNA, 24 bp, Artificial Sequence
  Synthetic construct
agttggccaccacctggtgttgat

SEQ ID NO: 2563 - DNA, 18 bp, Artificial Sequence
  Synthetic construct
caagaccctgcgaggctg

SEQ ID NO: 2564 - DNA, 22 bp, Artificial Sequence
  Synthetic construct
ggatcaaatggttgtcagaacc

SEQ ID NO: 2565 - DNA, 24 bp, Artificial Sequence
  Synthetic construct
ccgagctggcatgatcttctacag

SEQ ID NO: 2566 - DNA, 20 bp, Artificial Sequence
  Synthetic construct
ccatctgtgcctttggaacg

SEQ ID NO: 2567 - DNA, 18 bp, Artificial Sequence
  Synthetic construct
gccatgtggtgaccacca

SEQ ID NO: 2568 - DNA, 22 bp, Artificial Sequence
  Synthetic construct
acaggcttctagcaccttctca

SEQ ID NO: 2569 - DNA, 23 bp, Artificial Sequence
  Synthetic construct
cactcacaagaccctgcgaggct

SEQ ID NO: 2570 - DNA, 23 bp, Artificial Sequence
  Synthetic construct
tctgtgcctttggaacggagatc

SEQ ID NO: 2571 - DNA, 18 bp, Artificial Sequence
  Synthetic construct
acatcagcgggctggtgg

SEQ ID NO: 2572 - DNA, 20 bp, Artificial Sequence
  Synthetic construct
tggaacggagatccacaagg

SEQ ID NO: 2573 - DNA, 19 bp, Artificial Sequence
  Synthetic construct
gaggctgccgagctggcat

SEQ ID NO: 2574 - DNA, 24 bp, Artificial Sequence
  Synthetic construct
gaacggagatccacaaggatcaaa

SEQ ID NO: 2575 - DNA, 19 bp, Artificial Sequence
  Synthetic construct
cgtggtgccctccccattt

SEQ ID NO: 2576 - DNA, 26 bp, Artificial Sequence
  Synthetic construct
gagatccacaaggatcaaatggttgt

SEQ ID NO: 2577 - DNA, 18 bp, Artificial Sequence
  Synthetic construct
gctggcgtggtgccctcc

SEQ ID NO: 2578 - DNA, 26 bp, Artificial Sequence
  Synthetic construct
ggcttctagcaccttctcagcccttc

SEQ ID NO: 2579 - DNA, 19 bp, Artificial Sequence
  Synthetic construct
ggctcacatcagcgggctg

SEQ ID NO: 2580 - DNA, 21 bp, Artificial Sequence
  Synthetic construct
ccttctcagcccttccaccat

SEQ ID NO: 2581 - DNA, 19 bp, Artificial Sequence
  Synthetic construct
aaacctggaatatgcccgg

SEQ ID NO: 2582 - DNA, 20 bp, Artificial Sequence
  Synthetic construct
cttccaccatctgtgccttt

SEQ ID NO: 2583 - DNA, 20 bp, Artificial Sequence
  Synthetic construct
gcccggctacggaagattgc

SEQ ID NO: 2584 - DNA, 22 bp, Artificial Sequence
  Synthetic construct
tcagcccttccaccatctgtgc

SEQ ID NO: 2585 - DNA, 21 bp, Artificial Sequence
  Synthetic construct
ggcaagtttcaaccatatgcc

SEQ ID NO: 2586 - DNA, 22 bp, Artificial Sequence
  Synthetic construct
ggagccataaatgactggtgac

SEQ ID NO: 2587 - DNA, 23 bp, Artificial Sequence
  Synthetic construct
aaacaacctgtattgtgactgcc

SEQ ID NO: 2588 - DNA, 20 bp, Artificial Sequence
  Synthetic construct
cctcgggttggtctgtacac

SEQ ID NO: 2589 - DNA, 21 bp, Artificial Sequence
  Synthetic construct
tggtctctggaagatttgtgg

SEQ ID NO: 2590 - DNA, 20 bp, Artificial Sequence
  Synthetic construct
tcgactgcattcaaacaacc

SEQ ID NO: 2591 - DNA, 20 bp, Artificial Sequence
  Synthetic construct
tgagacctttcccacgacag

SEQ ID NO: 2592 - DNA, 20 bp, Artificial Sequence
  Synthetic construct
ccacctgagaggccataatg

SEQ ID NO: 2593 - DNA, 22 bp, Artificial Sequence
  Synthetic construct
cccacgacagtctacgatattg

SEQ ID NO: 2594 - DNA, 21 bp, Artificial Sequence
  Synthetic construct
gccataatgtagccgaggttc

SEQ ID NO: 2595 - DNA, 22 bp, Artificial Sequence
  Synthetic construct
tttctgtgatggtctctggaag

SEQ ID NO: 2596 - DNA, 18 bp, Artificial Sequence
  Synthetic construct
gactggcttcgccaaagg

SEQ ID NO: 2597 - DNA, 24 bp, Artificial Sequence
  Synthetic construct
cgatattgttgctacaggtacagg

SEQ ID NO: 2598 - DNA, 22 bp, Artificial Sequence
  Synthetic construct
aaacgagaatttgtctgcagtg

SEQ ID NO: 2599 - DNA, 22 bp, Artificial Sequence
  Synthetic construct
aagatttgtggggatctcagtg

SEQ ID NO: 2600 - DNA, 22 bp, Artificial Sequence
  Synthetic construct
gggttggtctgtacactcagtg

SEQ ID NO: 2601 - DNA, 23 bp, Artificial Sequence
  Synthetic construct
tgcaaaacactacaagaaggagc

SEQ ID NO: 2602 - DNA, 23 bp, Artificial Sequence
  Synthetic construct
ctgcattcaaacaacctgtattg

SEQ ID NO: 2603 - DNA, 23 bp, Artificial Sequence
  Synthetic construct
caagaaggagccataaatgactg

SEQ ID NO: 2604 - DNA, 21 bp, Artificial Sequence
  Synthetic construct
tgtattgtgactgccacctgg

SEQ ID NO: 2605 - DNA, 22 bp, Artificial Sequence
  Synthetic construct
gggatctcagtgagacctttcc

SEQ ID NO: 2606 - DNA, 21 bp, Artificial Sequence
  Synthetic construct
tgagaggccataatgtagccg

SEQ ID NO: 2607 - DNA, 22 bp, Artificial Sequence
  Synthetic construct
acctttcccacgacagtctacg

SEQ ID NO: 2608 - DNA, 22 bp, Artificial Sequence
  Synthetic construct
tgtacactcagtgtatgggccc

SEQ ID NO: 2609 - DNA, 20 bp, Artificial Sequence
  Synthetic construct
ctacaggtacaggcggcagg

SEQ ID NO: 2610 - DNA, 20 bp, Artificial Sequence
  Synthetic construct
agccgaggttcaaaaacgag

SEQ ID NO: 2611 - DNA, 23 bp, Artificial Sequence
  Synthetic construct
ctctggaagatttgtggggatct

SEQ ID NO: 2612 - DNA, 18 bp, Artificial Sequence
  Synthetic construct
ggctctccgactggcttc

SEQ ID NO: 2613 - DNA, 26 bp, Artificial Sequence
  Synthetic construct
acagtctacgatattgttgctacagg

SEQ ID NO: 2614 - DNA, 19 bp, Artificial Sequence
  Synthetic construct
aaaggcctcgggttggtct

SEQ ID NO: 2615 - DNA, 21 bp, Artificial Sequence
  Synthetic construct
agggcagtgcaaaacactaca

SEQ ID NO: 2616 - DNA, 20 bp, Artificial Sequence
  Synthetic construct
tctccgactggcttcgccaa

SEQ ID NO: 2617 - DNA, 27 bp, Artificial Sequence
  Synthetic construct
tctgtgatggtctctggaagatttgtg

SEQ ID NO: 2618 - DNA, 18 bp, Artificial Sequence
  Synthetic construct
gcttcgccaaaggcctcg

SEQ ID NO: 2619 - DNA, 20 bp, Artificial Sequence
  Synthetic construct
gtacaggcggcagggcagtg

SEQ ID NO: 2620 - DNA, 18 bp, Artificial Sequence
  Synthetic construct
ccctcccacctgagaggc

SEQ ID NO: 2621 - DNA, 24 bp, Artificial Sequence
  Synthetic construct
tctcagtgagacctttcccacgac

SEQ ID NO: 2622 - DNA, 24 bp, Artificial Sequence
  Synthetic construct
ccgaggttcaaaaacgagaatttg

SEQ ID NO: 2623 - DNA, 24 bp, Artificial Sequence
  Synthetic construct
tttgtggggatctcagtgagacct

SEQ ID NO: 2624 - DNA, 18 bp, Artificial Sequence
  Synthetic construct
cacctggcctggctctcc

SEQ ID NO: 2625 - DNA, 26 bp, Artificial Sequence
  Synthetic construct
aacactacaagaaggagccataaatg

SEQ ID NO: 2626 - DNA, 23 bp, Artificial Sequence
  Synthetic construct
taatgtagccgaggttcaaaaac

SEQ ID NO: 2627 - DNA, 22 bp, Artificial Sequence
  Synthetic construct
tgattgtgttctgttccaaacg

SEQ ID NO: 2628 - DNA, 18 bp, Artificial Sequence
  Synthetic construct
ggcctggctctccgactg

SEQ ID NO: 2629 - DNA, 24 bp, Artificial Sequence
  Synthetic construct
agggatgactttgattgtgttctg

SEQ ID NO: 2630 - DNA, 20 bp, Artificial Sequence
  Synthetic construct
agtgtatgggcccctcccac

SEQ ID NO: 2631 - DNA, 27 bp, Artificial Sequence
  Synthetic construct
atgactttgattgtgttctgttccaaa

SEQ ID NO: 2632 - DNA, 27 bp, Artificial Sequence
  Synthetic construct
gttggtctgtacactcagtgtatgggc

SEQ ID NO: 2633 - DNA, 21 bp, Artificial Sequence
  Synthetic construct
tgagaaagctccaggagggat

SEQ ID NO: 2634 - DNA, 27 bp, Artificial Sequence
  Synthetic construct
ggttcaaaaacgagaatttgtctgcag

SEQ ID NO: 2635 - DNA, 24 bp, Artificial Sequence
  Synthetic construct
gaaagctccaggagggatgacttt

SEQ ID NO: 2636 - DNA, 27 bp, Artificial Sequence
  Synthetic construct
ctcccacctgagaggccataatgtagc

SEQ ID NO: 2637 - DNA, 26 bp, Artificial Sequence
  Synthetic construct
ctccaggagggatgactttgattgtg

SEQ ID NO: 2638 - DNA, 19 bp, Artificial Sequence
  Synthetic construct
tgactgccacctggcctgg

SEQ ID NO: 2639 - DNA, 21 bp, Artificial Sequence
  Synthetic construct
ttggaaagcatctggtgcaag

SEQ ID NO: 2640 - DNA, 20 bp, Artificial Sequence
  Synthetic construct
atgggcccctcccacctgag

SEQ ID NO: 2641 - DNA, 26 bp, Artificial Sequence
  Synthetic construct
ggaaagcatctggtgcaagttcagag

SEQ ID NO: 2642 - DNA, 21 bp, Artificial Sequence
  Synthetic construct
ggcaagtttcaaccatatgcc

SEQ ID NO: 2643 - DNA, 23 bp, Artificial Sequence
  Synthetic construct
ttatatggtgagaaagctccagg

SEQ ID NO: 2644 - DNA, 25 bp, Artificial Sequence
  Synthetic construct
tcaaccatatgcctaaacttaggac

SEQ ID NO: 2645 - DNA, 27 bp, Artificial Sequence
  Synthetic construct
tctaagctttttatatggtgagaaagc

SEQ ID NO: 2646 - DNA, 21 bp, Artificial Sequence
  Synthetic construct
tttctgtggcaagtttcaacc

SEQ ID NO: 2647 - DNA, 24 bp, Artificial Sequence
  Synthetic construct
gagatctgattattgctcaggtca

SEQ ID NO: 2648 - DNA, 25 bp, Artificial Sequence
  Synthetic construct
actagactttctgtggcaagtttca

SEQ ID NO: 2649 - DNA, 24 bp, Artificial Sequence
  Synthetic construct
tctggtgcaagttcagagatctga

SEQ ID NO: 2650 - DNA, 25 bp, Artificial Sequence
  Synthetic construct
caacattactagactttctgtggca

SEQ ID NO: 2651 - DNA, 22 bp, Artificial Sequence
  Synthetic construct
gtagtccttggaaagcatctgg

SEQ ID NO: 2652 - DNA, 21 bp, Artificial Sequence
  Synthetic construct
atcgagatcctctgtggcttc

SEQ ID NO: 2653 - DNA, 21 bp, Artificial Sequence
  Synthetic construct
gaacactgctctgcaggctag

SEQ ID NO: 2654 - DNA, 21 bp, Artificial Sequence
  Synthetic construct
tgtggcttccagattgtcaac

SEQ ID NO: 2655 - DNA, 18 bp, Artificial Sequence
  Synthetic construct
atgctgtggctccgtcag

SEQ ID NO: 2656 - DNA, 20 bp, Artificial Sequence
  Synthetic construct
caaccctgctcacttcatca

SEQ ID NO: 2657 - DNA, 19 bp, Artificial Sequence
  Synthetic construct
ctctgagatcccaggccat

SEQ ID NO: 2658 - DNA, 20 bp, Artificial Sequence
  Synthetic construct
agattgtcaacaaccctggc

SEQ ID NO: 2659 - DNA, 18 bp, Artificial Sequence
  Synthetic construct
gctgccgaacactgctct

SEQ ID NO: 2660 - DNA, 20 bp, Artificial Sequence
  Synthetic construct
atccactcactggtggctgc

SEQ ID NO: 2661 - DNA, 20 bp, Artificial Sequence
  Synthetic construct
agatcccaggccatgctgtg

SEQ ID NO: 2662 - DNA, 20 bp, Artificial Sequence
  Synthetic construct
aagcactgagcgaggtgaca

SEQ ID NO: 2663 - DNA, 18 bp, Artificial Sequence
  Synthetic construct
aggccatgctgtggctcc

SEQ ID NO: 2664 - DNA, 23 bp, Artificial Sequence
  Synthetic construct
gcttccagattgtcaacaaccct

SEQ ID NO: 2665 - DNA, 18 bp, Artificial Sequence
  Synthetic construct
caggcgctgccgaacact

SEQ ID NO: 2666 - DNA, 20 bp, Artificial Sequence
  Synthetic construct
accgctggcaacagatcgag

SEQ ID NO: 2667 - DNA, 18 bp, Artificial Sequence
  Synthetic construct
gtggctccgtcaggcgct

SEQ ID NO: 2668 - DNA, 20 bp, Artificial Sequence
  Synthetic construct
gacgtggatgacatggatga

SEQ ID NO: 2669 - DNA, 20 bp, Artificial Sequence
  Synthetic construct
aatcggaatgggtcaaatcc

SEQ ID NO: 2670 - DNA, 20 bp, Artificial Sequence
  Synthetic construct
ttgtgtctcccttgtccatg

SEQ ID NO: 2671 - DNA, 20 bp, Artificial Sequence
  Synthetic construct
agcgccagtaatgccttctt

SEQ ID NO: 2672 - DNA, 23 bp, Artificial Sequence
  Synthetic construct
acatggatgaggagattgtgtct

SEQ ID NO: 2673 - DNA, 20 bp, Artificial Sequence
  Synthetic construct
aagtcatggcattgagagcc

SEQ ID NO: 2674 - DNA, 21 bp, Artificial Sequence
  Synthetic construct
ttcatcatgactgacgacgtg

SEQ ID NO: 2675 - DNA, 21 bp, Artificial Sequence
  Synthetic construct
gcagtttctccaccagagacc

SEQ ID NO: 2676 - DNA, 20 bp, Artificial Sequence
  Synthetic construct
agctggatgggcagtacacg

SEQ ID NO: 2677 - DNA, 20 bp, Artificial Sequence
  Synthetic construct
gtcactcatgtggagggagg

SEQ ID NO: 2678 - DNA, 22 bp, Artificial Sequence
  Synthetic construct
gaggagattgtgtctcccttgt

SEQ ID NO: 2679 - DNA, 20 bp, Artificial Sequence
  Synthetic construct
agtaatgccttcttggccag

SEQ ID NO: 2680 - DNA, 20 bp, Artificial Sequence
  Synthetic construct
cctcaacatagaccccagct

SEQ ID NO: 2681 - DNA, 20 bp, Artificial Sequence
  Synthetic construct
attgagagcctcgtctgcag

SEQ ID NO: 2682 - DNA, 22 bp, Artificial Sequence
  Synthetic construct
gctcacttcatcatgactgacg

SEQ ID NO: 2683 - DNA, 20 bp, Artificial Sequence
  Synthetic construct
gaggactccgaatcggaatg

SEQ ID NO: 2684 - DNA, 21 bp, Artificial Sequence
  Synthetic construct
atgactgacgacgtggatgac

SEQ ID NO: 2685 - DNA, 20 bp, Artificial Sequence
  Synthetic construct
gctcatctgaggaggtttgg

SEQ ID NO: 2686 - DNA, 22 bp, Artificial Sequence
  Synthetic construct
tggatgacatggatgaggagat

SEQ ID NO: 2687 - DNA, 19 bp, Artificial Sequence
  Synthetic construct
ctgccattggaagtcatgg

SEQ ID NO: 2688 - DNA, 20 bp, Artificial Sequence
  Synthetic construct
aaccctggcatccactcact

SEQ ID NO: 2689 - DNA, 18 bp, Artificial Sequence
  Synthetic construct
gctggcggtcactcatgt

SEQ ID NO: 2690 - DNA, 18 bp, Artificial Sequence
  Synthetic construct
agtacacgccccaaccct

SEQ ID NO: 2691 - DNA, 20 bp, Artificial Sequence
  Synthetic construct
cattggaagtcatggcattg

SEQ ID NO: 2692 - DNA, 20 bp, Artificial Sequence
  Synthetic construct
gctgccctcaacatagaccc

SEQ ID NO: 2693 - DNA, 20 bp, Artificial Sequence
  Synthetic construct
agcacggctcatctgaggag

SEQ ID NO: 2694 - DNA, 20 bp, Artificial Sequence
  Synthetic construct
acatagaccccagctggatg

SEQ ID NO: 2695 - DNA, 20 bp, Artificial Sequence
  Synthetic construct
atggcattgagagcctcgtc

SEQ ID NO: 2696 - DNA, 20 bp, Artificial Sequence
  Synthetic construct
tcaacaaccctggcatccac

SEQ ID NO: 2697 - DNA, 20 bp, Artificial Sequence
  Synthetic construct
ctccgaatcggaatgggtca

SEQ ID NO: 2698 - DNA, 21 bp, Artificial Sequence
  Synthetic construct
atcctctgtggcttccagatt

SEQ ID NO: 2699 - DNA, 19 bp, Artificial Sequence
  Synthetic construct
ggagggaggactccgaatc

SEQ ID NO: 2700 - DNA, 24 bp, Artificial Sequence
  Synthetic construct
actgacgacgtggatgacatggat

SEQ ID NO: 2701 - DNA, 21 bp, Artificial Sequence
  Synthetic construct
caccagagaccctgggtggac

SEQ ID NO: 2702 - DNA, 22 bp, Artificial Sequence
  Synthetic construct
actggtggctgccctcaacata

SEQ ID NO: 2703 - DNA, 20 bp, Artificial Sequence
  Synthetic construct
gtctgcagcacggctcatct

SEQ ID NO: 2704 - DNA, 27 bp, Artificial Sequence
  Synthetic construct
gagattgtgtctcccttgtccatgcag

SEQ ID NO: 2705 - DNA, 19 bp, Artificial Sequence
  Synthetic construct
ctcgatcagccggtggctg

SEQ ID NO: 2706 - DNA, 24 bp, Artificial Sequence
  Synthetic construct
gcaacagatcgagatcctctgtgg

SEQ ID NO: 2707 - DNA, 19 bp, Artificial Sequence
  Synthetic construct
cacacgctggcggtcactc

SEQ ID NO: 2708 - DNA, 27 bp, Artificial Sequence
  Synthetic construct
caaccctgctcacttcatcatgactga

SEQ ID NO: 2709 - DNA, 20 bp, Artificial Sequence
  Synthetic construct
cggtggctgccattggaagt

SEQ ID NO: 2710 - DNA, 20 bp, Artificial Sequence
  Synthetic construct
atgggcagtacacgccccaa

SEQ ID NO: 2711 - DNA, 20 bp, Artificial Sequence
  Synthetic construct
gagcctcgtctgcagcacgg

SEQ ID NO: 2712 - DNA, 20 bp, Artificial Sequence
  Synthetic construct
acgccccaaccctgctcact

SEQ ID NO: 2713 - DNA, 20 bp, Artificial Sequence
  Synthetic construct
atcagccggtggctgccatt

SEQ ID NO: 2714 - DNA, 20 bp, Artificial Sequence
  Synthetic construct
accccagctggatgggcagt

SEQ ID NO: 2715 - DNA, 20 bp, Artificial Sequence
  Synthetic construct
aggaggtttgggggccacac

SEQ ID NO: 2716 - DNA, 20 bp, Artificial Sequence
  Synthetic construct
cacaacttccaggttcccat

SEQ ID NO: 2717 - DNA, 21 bp, Artificial Sequence
  Synthetic construct
cccagttctttgtcttccagc

SEQ ID NO: 2718 - DNA, 18 bp, Artificial Sequence
  Synthetic construct
ctttgtctgcagcccagg

SEQ ID NO: 2719 - DNA, 22 bp, Artificial Sequence
  Synthetic construct
gaaatgttaattttggaggccg

SEQ ID NO: 2720 - DNA, 18 bp, Artificial Sequence
  Synthetic construct
ccagggtgcaagttctgg

SEQ ID NO: 2721 - DNA, 22 bp, Artificial Sequence
  Synthetic construct
aattttggaggccgtccacaac

SEQ ID NO: 2722 - DNA, 20 bp, Artificial Sequence
  Synthetic construct
ctgcagcccagggtgcaagt

SEQ ID NO: 2723 - DNA, 20 bp, Artificial Sequence
  Synthetic construct
ccgtccacaacttccaggtt

SEQ ID NO: 2724 - DNA, 21 bp, Artificial Sequence
  Synthetic construct
ttctggctcatacggattgaa

SEQ ID NO: 2725 - DNA, 20 bp, Artificial Sequence
  Synthetic construct
cttccaggttcccatcctgc

SEQ ID NO: 2726 - DNA, 22 bp, Artificial Sequence
  Synthetic construct
agggtgcaagttctggctcata

SEQ ID NO: 2727 - DNA, 26 bp, Artificial Sequence
  Synthetic construct
cgagcattattcttataaagcagatg

SEQ ID NO: 2728 - DNA, 22 bp, Artificial Sequence
  Synthetic construct
atgacacagtactctcttgccg

SEQ ID NO: 2729 - DNA, 24 bp, Artificial Sequence
  Synthetic construct
gagttcttactgtcccatgtcaaa

SEQ ID NO: 2730 - DNA, 22 bp, Artificial Sequence
  Synthetic construct
gctcatacggattgaatgacac

SEQ ID NO: 2731 - DNA, 26 bp, Artificial Sequence
  Synthetic construct
ggtttgttaagagttcttactgtccc

SEQ ID NO: 2732 - DNA, 21 bp, Artificial Sequence
  Synthetic construct
tactctcttgccggttccctt

SEQ ID NO: 2733 - DNA, 20 bp, Artificial Sequence
  Synthetic construct
gacaacaacggctcctacgc

SEQ ID NO: 2734 - DNA, 24 bp, Artificial Sequence
  Synthetic construct
tgcaagttctggctcatacggatt

SEQ ID NO: 2735 - DNA, 20 bp, Artificial Sequence
  Synthetic construct
tgcacgaagggaaggtgctg

SEQ ID NO: 2736 - DNA, 27 bp, Artificial Sequence
  Synthetic construct
gacacagtactctcttgccggttccct

SEQ ID NO: 2737 - DNA, 20 bp, Artificial Sequence
  Synthetic construct
ccagagacaacaacggctcc

SEQ ID NO: 2738 - DNA, 18 bp, Artificial Sequence
  Synthetic construct
ttcccttgggcaggggag

SEQ ID NO: 2739 - DNA, 20 bp, Artificial Sequence
  Synthetic construct
tcctacgccctgtgcctgct

SEQ ID NO: 2740 - DNA, 18 bp, Artificial Sequence
  Synthetic construct
gccggttcccttgggcag

SEQ ID NO: 2741 - DNA, 27 bp, Artificial Sequence
  Synthetic construct
agcagatggtttgttaagagttcttac

SEQ ID NO: 2742 - DNA, 21 bp, Artificial Sequence
  Synthetic construct
cccagttctttgtcttccagc

SEQ ID NO: 2743 - DNA, 20 bp, Artificial Sequence
  Synthetic construct
cgagggaaagaagttcgaca

SEQ ID NO: 2744 - DNA, 21 bp, Artificial Sequence
  Synthetic construct
tcgtacacctctgtgtccatg

SEQ ID NO: 2745 - DNA, 22 bp, Artificial Sequence
  Synthetic construct
cactatcgcatcgacaaagaca

SEQ ID NO: 2746 - DNA, 21 bp, Artificial Sequence
  Synthetic construct
atgggtagggcttctctctgg

SEQ ID NO: 2747 - DNA, 22 bp, Artificial Sequence
  Synthetic construct
caaagacaagacagggaagctc

SEQ ID NO: 2748 - DNA, 21 bp, Artificial Sequence
  Synthetic construct
gtaggggctctcgtacacctc

SEQ ID NO: 2749 - DNA, 20 bp, Artificial Sequence
  Synthetic construct
agaagttcgacacgctctgg

SEQ ID NO: 2750 - DNA, 20 bp, Artificial Sequence
  Synthetic construct
aggtaaacctccttgggcct

SEQ ID NO: 2751 - DNA, 21 bp, Artificial Sequence
  Synthetic construct
aagacagggaagctctccatc

SEQ ID NO: 2752 - DNA, 20 bp, Artificial Sequence
  Synthetic construct
ctctgtgtccatgggtaggg

SEQ ID NO: 2753 - DNA, 22 bp, Artificial Sequence
  Synthetic construct
gcatcgacaaagacaagacagg

SEQ ID NO: 2754 - DNA, 20 bp, Artificial Sequence
  Synthetic construct
tgtccatgggtagggcttct

SEQ ID NO: 2755 - DNA, 24 bp, Artificial Sequence
  Synthetic construct
agggaaagaagttcgacacgctct

SEQ ID NO: 2756 - DNA, 20 bp, Artificial Sequence
  Synthetic construct
tccttgggcctgatctcctc

SEQ ID NO: 2757 - DNA, 19 bp, Artificial Sequence
  Synthetic construct
gaagctctccatccccgag

SEQ ID NO: 2758 - DNA, 23 bp, Artificial Sequence
  Synthetic construct
gggctctcgtacacctctgtgtc

SEQ ID NO: 2759 - DNA, 20 bp, Artificial Sequence
  Synthetic construct
atccccgagggaaagaagtt

SEQ ID NO: 2760 - DNA, 20 bp, Artificial Sequence
  Synthetic construct
tcggtccaggtaaacctcct

SEQ ID NO: 2761 - DNA, 20 bp, Artificial Sequence
  Synthetic construct
ctgtgcctgctgcacgaagg

SEQ ID NO: 2762 - DNA, 27 bp, Artificial Sequence
  Synthetic construct
ctgtgtccatgggtagggcttctctct

SEQ ID NO: 2763 - DNA, 20 bp, Artificial Sequence
  Synthetic construct
tctccatccccgagggaaag

SEQ ID NO: 2764 - DNA, 23 bp, Artificial Sequence
  Synthetic construct
taaacctccttgggcctgatctc

SEQ ID NO: 2765 - DNA, 20 bp, Artificial Sequence
  Synthetic construct
tgctgcactatcgcatcgac

SEQ ID NO: 2766 - DNA, 19 bp, Artificial Sequence
  Synthetic construct
ggtccgcgtaggggctctc

SEQ ID NO: 2767 - DNA, 21 bp, Artificial Sequence
  Synthetic construct
aagggaaggtgctgcactatc

SEQ ID NO: 2768 - DNA, 18 bp, Artificial Sequence
  Synthetic construct
ctgatctcctcggggtcc

SEQ ID NO: 2769 - DNA, 20 bp, Artificial Sequence
  Synthetic construct
cctgctgcacgaagggaagg

SEQ ID NO: 2770 - DNA, 19 bp, Artificial Sequence
  Synthetic construct
tcctcggggtccgcgtagg

SEQ ID NO: 2771 - DNA, 20 bp, Artificial Sequence
  Synthetic construct
ctcacgaagaggacgaggag

SEQ ID NO: 2772 - DNA, 20 bp, Artificial Sequence
  Synthetic construct
ttgcttgtagtgatgctcgg

SEQ ID NO: 2773 - DNA, 21 bp, Artificial Sequence
  Synthetic construct
gaaccgtcatctcctcagtcc

SEQ ID NO: 2774 - DNA, 20 bp, Artificial Sequence
  Synthetic construct
tcctgtcaccttccatttgc

SEQ ID NO: 2775 - DNA, 22 bp, Artificial Sequence
  Synthetic construct
tcctcagtccctgtgtcatcta

SEQ ID NO: 2776 - DNA, 22 bp, Artificial Sequence
  Synthetic construct
caccttccatttgcttgtagtg

SEQ ID NO: 2777 - DNA, 22 bp, Artificial Sequence
  Synthetic construct
ggcctctgagaatgaaacagac

SEQ ID NO: 2778 - DNA, 20 bp, Artificial Sequence
  Synthetic construct
gccatccgaaatggatttac

SEQ ID NO: 2779 - DNA, 20 bp, Artificial Sequence
  Synthetic construct
ctgattcttggcgtaaacgg

SEQ ID NO: 2780 - DNA, 22 bp, Artificial Sequence
  Synthetic construct
gaacaggtggaacattcctgtc

SEQ ID NO: 2781 - DNA, 23 bp, Artificial Sequence
  Synthetic construct
gaatgaaacagacatggaagacc

SEQ ID NO: 2782 - DNA, 20 bp, Artificial Sequence
  Synthetic construct
gtagtgatgctcgggacagg

SEQ ID NO: 2783 - DNA, 20 bp, Artificial Sequence
  Synthetic construct
cctgtgtcatctagtggccc

SEQ ID NO: 2784 - DNA, 20 bp, Artificial Sequence
  Synthetic construct
tggtttataaggggtgctgg

SEQ ID NO: 2785 - DNA, 22 bp, Artificial Sequence
  Synthetic construct
aagaccccagagaaatccagac

SEQ ID NO: 2786 - DNA, 21 bp, Artificial Sequence
  Synthetic construct
gaacattcctgtcaccttcca

SEQ ID NO: 2787 - DNA, 21 bp, Artificial Sequence
  Synthetic construct
gcttggaagatgaaaaggagg

SEQ ID NO: 2788 - DNA, 18 bp, Artificial Sequence
  Synthetic construct
aagggctgtcgggaacat

SEQ ID NO: 2789 - DNA, 22 bp, Artificial Sequence
  Synthetic construct
gaaatccagactgattcttggc

SEQ ID NO: 2790 - DNA, 24 bp, Artificial Sequence
  Synthetic construct
ttccatttgcttgtagtgatgctc

SEQ ID NO: 2791 - DNA, 20 bp, Artificial Sequence
  Synthetic construct
agagagcgaggaaccgtcat

SEQ ID NO: 2792 - DNA, 23 bp, Artificial Sequence
  Synthetic construct
atagggtggtttataaggggtgc

SEQ ID NO: 2793 - DNA, 22 bp, Artificial Sequence
  Synthetic construct
gtcatctcctcagtccctgtgt

SEQ ID NO: 2794 - DNA, 18 bp, Artificial Sequence
  Synthetic construct
gggaacatgccacgagtg

SEQ ID NO: 2795 - DNA, 20 bp, Artificial Sequence
  Synthetic construct
gtaaacggggagagagcgag

SEQ ID NO: 2796 - DNA, 18 bp, Artificial Sequence
  Synthetic construct
ctgtcgggaacatgccac

SEQ ID NO: 2797 - DNA, 19 bp, Artificial Sequence
  Synthetic construct
tgtcagcgtggactccatc

SEQ ID NO: 2798 - DNA, 18 bp, Artificial Sequence
  Synthetic construct
cgggacaggaagggctgt

SEQ ID NO: 2799 - DNA, 23 bp, Artificial Sequence
  Synthetic construct
cccagagaaatccagactgattc

SEQ ID NO: 2800 - DNA, 18 bp, Artificial Sequence
  Synthetic construct
gagtggccatccgaaatg

SEQ ID NO: 2801 - DNA, 18 bp, Artificial Sequence
  Synthetic construct
gaccacacaggcgacgtg

SEQ ID NO: 2802 - DNA, 19 bp, Artificial Sequence
  Synthetic construct
atgctcgggacaggaaggg

SEQ ID NO: 2803 - DNA, 20 bp, Artificial Sequence
  Synthetic construct
ggcccatactacagcgcact

SEQ ID NO: 2804 - DNA, 20 bp, Artificial Sequence
  Synthetic construct
agggggaacaggtggaacat

SEQ ID NO: 2805 - DNA, 20 bp, Artificial Sequence
  Synthetic construct
gggctcctcctctcacgaag

SEQ ID NO: 2806 - DNA, 27 bp, Artificial Sequence
  Synthetic construct
attcctgtcaccttccatttgcttgta

SEQ ID NO: 2807 - DNA, 20 bp, Artificial Sequence
  Synthetic construct
cttggcgtaaacggggagag

SEQ ID NO: 2808 - DNA, 20 bp, Artificial Sequence
  Synthetic construct
acaggaagggctgtcgggaa

SEQ ID NO: 2809 - DNA, 22 bp, Artificial Sequence
  Synthetic construct
aggacgaggagggcccatacta

SEQ ID NO: 2810 - DNA, 21 bp, Artificial Sequence
  Synthetic construct
tataaggggtgctggacgcag

SEQ ID NO: 2811 - DNA, 20 bp, Artificial Sequence
  Synthetic construct
gcgaggaaccgtcatctcct

SEQ ID NO: 2812 - DNA, 19 bp, Artificial Sequence
  Synthetic construct
ctggacgcagggggaacag

SEQ ID NO: 2813 - DNA, 26 bp, Artificial Sequence
  Synthetic construct
atccagactgattcttggcgtaaacg

SEQ ID NO: 2814 - DNA, 27 bp, Artificial Sequence
  Synthetic construct
atttgcttgtagtgatgctcgggacag

SEQ ID NO: 2815 - DNA, 20 bp, Artificial Sequence
  Synthetic construct
ctcctctcacgaagaggacg

SEQ ID NO: 2816 - DNA, 22 bp, Artificial Sequence
  Synthetic construct
cgtgcctggaggtaatagtagc

SEQ ID NO: 2817 - DNA, 18 bp, Artificial Sequence
  Synthetic construct
ctgcgagacccctgtcag

SEQ ID NO: 2818 - DNA, 19 bp, Artificial Sequence
  Synthetic construct
cttctttgccaccatccgt

SEQ ID NO: 2819 - DNA, 19 bp, Artificial Sequence
  Synthetic construct
ctggagtgggaccacacag

SEQ ID NO: 2820 - DNA, 20 bp, Artificial Sequence
  Synthetic construct
gtgggttgccattcaggact

SEQ ID NO: 2821 - DNA, 20 bp, Artificial Sequence
  Synthetic construct
agacccctgtcagcgtggac

SEQ ID NO: 2822 - DNA, 20 bp, Artificial Sequence
  Synthetic construct
gtcttcctgctgtgggttgc

SEQ ID NO: 2823 - DNA, 19 bp, Artificial Sequence
  Synthetic construct
actccatccccctggagtg

SEQ ID NO: 2824 - DNA, 20 bp, Artificial Sequence
  Synthetic construct
ctgctgctctgtgataccgg

SEQ ID NO: 2825 - DNA, 18 bp, Artificial Sequence
  Synthetic construct
cacgagcggtctggctgc

SEQ ID NO: 2826 - DNA, 22 bp, Artificial Sequence
  Synthetic construct
accatccgtgcctggaggtaat

SEQ ID NO: 2827 - DNA, 20 bp, Artificial Sequence
  Synthetic construct
agtgggaccacacaggcgac

SEQ ID NO: 2828 - DNA, 20 bp, Artificial Sequence
  Synthetic construct
cgggccttctttgccaccat

SEQ ID NO: 2829 - DNA, 23 bp, Artificial Sequence
  Synthetic construct
gaggagggcccatactacagcgc

SEQ ID NO: 2830 - DNA, 20 bp, Artificial Sequence
  Synthetic construct
tttgccaccatccgtgcctg

SEQ ID NO: 2831 - DNA, 20 bp, Artificial Sequence
  Synthetic construct
agcgtggactccatccccct

SEQ ID NO: 2832 - DNA, 20 bp, Artificial Sequence
  Synthetic construct
attcaggactcgcgggcctt

SEQ ID NO: 2833 - DNA, 18 bp, Artificial Sequence
  Synthetic construct
ggtctggctgcgagaccc

SEQ ID NO: 2834 - DNA, 19 bp, Artificial Sequence
  Synthetic construct
ctgctgtgggttgccattc

SEQ ID NO: 2835 - DNA, 19 bp, Artificial Sequence
  Synthetic construct
atccccctggagtgggacc

SEQ ID NO: 2836 - DNA, 20 bp, Artificial Sequence
  Synthetic construct
gctctgtgataccggccagt

SEQ ID NO: 2837 - DNA, 18 bp, Artificial Sequence
  Synthetic construct
cagggcacgagcggtctg

SEQ ID NO: 2838 - DNA, 20 bp, Artificial Sequence
  Synthetic construct
ttgccattcaggactcgcgg

SEQ ID NO: 2839 - DNA, 20 bp, Artificial Sequence
  Synthetic construct
gtcatctagtggccccaggg

SEQ ID NO: 2840 - DNA, 18 bp, Artificial Sequence
  Synthetic construct
actcgcgggccttctttg

SEQ ID NO: 2841 - DNA, 20 bp, Artificial Sequence
  Synthetic construct
tagtggccccagggcacgag

SEQ ID NO: 2842 - DNA, 20 bp, Artificial Sequence
  Synthetic construct
gccagtcccccgtcttcctg

SEQ ID NO: 2843 - DNA, 20 bp, Artificial Sequence
  Synthetic construct
cggggagagagcgaggaacc

SEQ ID NO: 2844 - DNA, 20 bp, Artificial Sequence
  Synthetic construct
tcccccgtcttcctgctgtg

SEQ ID NO: 2845 - DNA, 20 bp, Artificial Sequence
  Synthetic construct
tgcccaattcttcaactcct

SEQ ID NO: 2846 - DNA, 21 bp, Artificial Sequence
  Synthetic construct
tgtaggctccagtttgctgtt

SEQ ID NO: 2847 - DNA, 22 bp, Artificial Sequence
  Synthetic construct
gtatgagtgtgccaagagatgg

SEQ ID NO: 2848 - DNA, 22 bp, Artificial Sequence
  Synthetic construct
aatcttcaggtgcttgaaatgc

SEQ ID NO: 2849 - DNA, 22 bp, Artificial Sequence
  Synthetic construct
ttcaactcctaccagccagatc

SEQ ID NO: 2850 - DNA, 22 bp, Artificial Sequence
  Synthetic construct
cttgaaatgcactgacatccag

SEQ ID NO: 2851 - DNA, 24 bp, Artificial Sequence
  Synthetic construct
caagacagaacctagaccagaagc

SEQ ID NO: 2852 - DNA, 22 bp, Artificial Sequence
  Synthetic construct
ttgattcacttacgcaacttgc

SEQ ID NO: 2853 - DNA, 21 bp, Artificial Sequence
  Synthetic construct
ccagccagatcaacacaattg

SEQ ID NO: 2854 - DNA, 26 bp, Artificial Sequence
  Synthetic construct
ccgacaaccatctaataaatcttcag

SEQ ID NO: 2855 - DNA, 22 bp, Artificial Sequence
  Synthetic construct
tgccaagagatggaatgtacac

SEQ ID NO: 2856 - DNA, 25 bp, Artificial Sequence
  Synthetic construct
ccagtttgctgttaagtgaattaca

SEQ ID NO: 2857 - DNA, 22 bp, Artificial Sequence
  Synthetic construct
gaccagaagcaaagactatgcc

SEQ ID NO: 2858 - DNA, 22 bp, Artificial Sequence
  Synthetic construct
caggtgcttgaaatgcactgac

SEQ ID NO: 2859 - DNA, 23 bp, Artificial Sequence
  Synthetic construct
tggaatgtacactgtgtgaccac

SEQ ID NO: 2860 - DNA, 21 bp, Artificial Sequence
  Synthetic construct
cgcaacttgcatttatgttgg

SEQ ID NO: 2861 - DNA, 23 bp, Artificial Sequence
  Synthetic construct
ccaattcttcaactcctaccagc

SEQ ID NO: 2862 - DNA, 24 bp, Artificial Sequence
  Synthetic construct
tgcactgacatccagattttctag

SEQ ID NO: 2863 - DNA, 24 bp, Artificial Sequence
  Synthetic construct
agactatgcccaattcttcaactc

SEQ ID NO: 2864 - DNA, 23 bp, Artificial Sequence
  Synthetic construct
tttcaagtgtaggctccagtttg

SEQ ID NO: 2865 - DNA, 23 bp, Artificial Sequence
  Synthetic construct
gtcagaagtatgagtgtgccaag

SEQ ID NO: 2866 - DNA, 24 bp, Artificial Sequence
  Synthetic construct
ttgcatttatgttggaaatattgc

SEQ ID NO: 2867 - DNA, 26 bp, Artificial Sequence
  Synthetic construct
tgtcaggatgaatccatatacaagac

SEQ ID NO: 2868 - DNA, 26 bp, Artificial Sequence
  Synthetic construct
ccatctaataaatcttcaggtgcttg

SEQ ID NO: 2869 - DNA, 23 bp, Artificial Sequence
  Synthetic construct
tgagaaaggtttttgtcaggatg

SEQ ID NO: 2870 - DNA, 25 bp, Artificial Sequence
  Synthetic construct
ttctagattttcaagtgtaggctcc

SEQ ID NO: 2871 - DNA, 26 bp, Artificial Sequence
  Synthetic construct
caagagatggaatgtacactgtgtga

SEQ ID NO: 2872 - DNA, 23 bp, Artificial Sequence
  Synthetic construct
cacttacgcaacttgcatttatg

SEQ ID NO: 2873 - DNA, 24 bp, Artificial Sequence
  Synthetic construct
agaacctagaccagaagcaaagac

SEQ ID NO: 2874 - DNA, 27 bp, Artificial Sequence
  Synthetic construct
tgctgttaagtgaattacatattgatt

SEQ ID NO: 2875 - DNA, 27 bp, Artificial Sequence
  Synthetic construct
atgagtgtgccaagagatggaatgtac

SEQ ID NO: 2876 - DNA, 27 bp, Artificial Sequence
  Synthetic construct
gtaggctccagtttgctgttaagtgaa

SEQ ID NO: 2877 - DNA, 21 bp, Artificial Sequence
  Synthetic construct
gtgtgaccacacagtggtttt

SEQ ID NO: 2878 - DNA, 24 bp, Artificial Sequence
  Synthetic construct
ttatgttggaaatattgctgacat

SEQ ID NO: 2879 - DNA, 23 bp, Artificial Sequence
  Synthetic construct
ctcctaccagccagatcaacaca

SEQ ID NO: 2880 - DNA, 21 bp, Artificial Sequence
  Synthetic construct
aaacgaactccacctccactg

SEQ ID NO: 2881 - DNA, 26 bp, Artificial Sequence
  Synthetic construct
tttgacagtattgagaaaggtttttg

SEQ ID NO: 2882 - DNA, 26 bp, Artificial Sequence
  Synthetic construct
catgagttacatcttcatttagctgg

SEQ ID NO: 2883 - DNA, 22 bp, Artificial Sequence
  Synthetic construct
ggtttttgtcaggatgaatcca

SEQ ID NO: 2884 - DNA, 25 bp, Artificial Sequence
  Synthetic construct
ccacctccactgttaataagtcttc

SEQ ID NO: 2885 - DNA, 21 bp, Artificial Sequence
  Synthetic construct
acacctcattgtgcaagaacc

SEQ ID NO: 2886 - DNA, 20 bp, Artificial Sequence
  Synthetic construct
ctgccactaaaaccgcaaag

SEQ ID NO: 2887 - DNA, 23 bp, Artificial Sequence
  Synthetic construct
tgaatgtacacacctcattgtgc

SEQ ID NO: 2888 - DNA, 20 bp, Artificial Sequence
  Synthetic construct
gctttctgccactaaaaccg

SEQ ID NO: 2889 - DNA, 21 bp, Artificial Sequence
  Synthetic construct
agcatggaggtcaatacatgg

SEQ ID NO: 2890 - DNA, 27 bp, Artificial Sequence
  Synthetic construct
tccactgttaataagtcttctcagttt

SEQ ID NO: 2891 - DNA, 26 bp, Artificial Sequence
  Synthetic construct
catggaggtcaatacatgggacaatt

SEQ ID NO: 2892 - DNA, 27 bp, Artificial Sequence
  Synthetic construct
gctttctgccactaaaaccgcaaagat

SEQ ID NO: 2893 - DNA, 24 bp, Artificial Sequence
  Synthetic construct
tcaatacatgggacaattgaaaat

SEQ ID NO: 2894 - DNA, 24 bp, Artificial Sequence
  Synthetic construct
cgaactccacctccactgttaata

SEQ ID NO: 2895 - DNA, 20 bp, Artificial Sequence
  Synthetic construct
ttggctgtccaatcacactc

SEQ ID NO: 2896 - DNA, 20 bp, Artificial Sequence
  Synthetic construct
atgcctctcagatggaatgg

SEQ ID NO: 2897 - DNA, 19 bp, Artificial Sequence
  Synthetic construct
atggctgaggcaggaacag

SEQ ID NO: 2898 - DNA, 20 bp, Artificial Sequence
  Synthetic construct
ctccgttgtcactcatgctg

SEQ ID NO: 2899 - DNA, 18 bp, Artificial Sequence
  Synthetic construct
gacgcatggctgaggcag

SEQ ID NO: 2900 - DNA, 20 bp, Artificial Sequence
  Synthetic construct
acagaggatggagcccgtct

SEQ ID NO: 2901 - DNA, 19 bp, Artificial Sequence
  Synthetic construct
ctggggacgcatggctgag

SEQ ID NO: 2902 - DNA, 18 bp, Artificial Sequence
  Synthetic construct
ggcctgagggcgctaggg

SEQ ID NO: 2903 - DNA, 22 bp, Artificial Sequence
  Synthetic construct
caatcacactccagtgtcaacc

SEQ ID NO: 2904 - DNA, 21 bp, Artificial Sequence
  Synthetic construct
ctccaggcagtcaaagatgtc

SEQ ID NO: 2905 - DNA, 20 bp, Artificial Sequence
  Synthetic construct
atcagggctccgtccacttg

SEQ ID NO: 2906 - DNA, 20 bp, Artificial Sequence
  Synthetic construct
gtcaaagatgtcacggctgc

SEQ ID NO: 2907 - DNA, 20 bp, Artificial Sequence
  Synthetic construct
cgctgaggaccttcatcagg

SEQ ID NO: 2908 - DNA, 20 bp, Artificial Sequence
  Synthetic construct
agctcatgcctctcagatgg

SEQ ID NO: 2909 - DNA, 20 bp, Artificial Sequence
  Synthetic construct
cagtgtcaaccactggcacc

SEQ ID NO: 2910 - DNA, 20 bp, Artificial Sequence
  Synthetic construct
tgggagaaggtggagctcat

SEQ ID NO: 2911 - DNA, 18 bp, Artificial Sequence
  Synthetic construct
aggcctgagacgaccacg

SEQ ID NO: 2912 - DNA, 19 bp, Artificial Sequence
  Synthetic construct
tcagatggaatggctgcac

SEQ ID NO: 2913 - DNA, 23 bp, Artificial Sequence
  Synthetic construct
gctgtccaatcacactccagtgt

SEQ ID NO: 2914 - DNA, 20 bp, Artificial Sequence
  Synthetic construct
aaggtggagctcatgcctct

SEQ ID NO: 2915 - DNA, 20 bp, Artificial Sequence
  Synthetic construct
aggaccttcatcagggctcc

SEQ ID NO: 2916 - DNA, 18 bp, Artificial Sequence
  Synthetic construct
caccgtggctgggaggag

SEQ ID NO: 2917 - DNA, 19 bp, Artificial Sequence
  Synthetic construct
cacccagcagccaagagag

SEQ ID NO: 2918 - DNA, 18 bp, Artificial Sequence
  Synthetic construct
gggccacagaggatggag

SEQ ID NO: 2919 - DNA, 20 bp, Artificial Sequence
  Synthetic construct
cacttggcccgcttggctgt

SEQ ID NO: 2920 - DNA, 20 bp, Artificial Sequence
  Synthetic construct
atggaatggctgcaccgtgg

SEQ ID NO: 2921 - DNA, 20 bp, Artificial Sequence
  Synthetic construct
aaccactggcacccagcagc

SEQ ID NO: 2922 - DNA, 24 bp, Artificial Sequence
  Synthetic construct
caggcagtcaaagatgtcacggct

SEQ ID NO: 2923 - DNA, 20 bp, Artificial Sequence
  Synthetic construct
ctgtgccgctgaggaccttc

SEQ ID NO: 2924 - DNA, 20 bp, Artificial Sequence
  Synthetic construct
tgcgctgggagaaggtggag

SEQ ID NO: 2925 - DNA, 20 bp, Artificial Sequence
  Synthetic construct
gcccgcttggctgtccaatc

SEQ ID NO: 2926 - DNA, 27 bp, Artificial Sequence
  Synthetic construct
agaaggtggagctcatgcctctcagat

SEQ ID NO: 2927 - DNA, 23 bp, Artificial Sequence
  Synthetic construct
accttcatcagggctccgtccac

SEQ ID NO: 2928 - DNA, 20 bp, Artificial Sequence
  Synthetic construct
agatgtcacggctgcgctgg

SEQ ID NO: 2929 - DNA, 23 bp, Artificial Sequence
  Synthetic construct
acactccagtgtcaaccactggc

SEQ ID NO: 2930 - DNA, 19 bp, Artificial Sequence
  Synthetic construct
acggctgcgctgggagaag

SEQ ID NO: 2931 - DNA, 19 bp, Artificial Sequence
  Synthetic construct
ccgtccacttggcccgctt

SEQ ID NO: 2932 - DNA, 20 bp, Artificial Sequence
  Synthetic construct
gccccctccaggcagtcaaa

SEQ ID NO: 2933 - DNA, 18 bp, Artificial Sequence
  Synthetic construct
cacgcctgtgccgctgag

SEQ ID NO: 2934 - DNA, 18 bp, Artificial Sequence
  Synthetic construct
atggagcccgtctggccg

SEQ ID NO: 2935 - DNA, 18 bp, Artificial Sequence
  Synthetic construct
agacgaccacgcctgtgc

SEQ ID NO: 2936 - DNA, 20 bp, Artificial Sequence
  Synthetic construct
tggtgtgggccacagaggat

SEQ ID NO: 2937 - DNA, 20 bp, Artificial Sequence
  Synthetic construct
actccgaggcctgagacgac

SEQ ID NO: 2938 - DNA, 19 bp, Artificial Sequence
  Synthetic construct
tcatgctggtgtgggccac

SEQ ID NO: 2939 - DNA, 20 bp, Artificial Sequence
  Synthetic construct
gactcaacgtgagacgcacc

SEQ ID NO: 2940 - DNA, 21 bp, Artificial Sequence
  Synthetic construct
ctctttcccagtgatgagctg

SEQ ID NO: 2941 - DNA, 22 bp, Artificial Sequence
  Synthetic construct
ccttgccaatggtatagtgacc

SEQ ID NO: 2942 - DNA, 20 bp, Artificial Sequence
  Synthetic construct
actgcagctagcgcagttct

SEQ ID NO: 2943 - DNA, 20 bp, Artificial Sequence
  Synthetic construct
acctgtcaccccgactcaac

SEQ ID NO: 2944 - DNA, 20 bp, Artificial Sequence
  Synthetic construct
ggtcaatgatctccttgcca

SEQ ID NO: 2945 - DNA, 22 bp, Artificial Sequence
  Synthetic construct
ctagcgcagttctcactgagac

SEQ ID NO: 2946 - DNA, 20 bp, Artificial Sequence
  Synthetic construct
gttgttggcagcatcctctt

SEQ ID NO: 2947 - DNA, 21 bp, Artificial Sequence
  Synthetic construct
tctcactgagacctgtcaccc

SEQ ID NO: 2948 - DNA, 20 bp, Artificial Sequence
  Synthetic construct
tgaccacgggcatagttgtt

SEQ ID NO: 2949 - DNA, 20 bp, Artificial Sequence
  Synthetic construct
accccgactcaacgtgagac

SEQ ID NO: 2950 - DNA, 20 bp, Artificial Sequence
  Synthetic construct
ggcatagttgttggcagcat

SEQ ID NO: 2951 - DNA, 18 bp, Artificial Sequence
  Synthetic construct
gtgcggcactgcagctag

SEQ ID NO: 2952 - DNA, 20 bp, Artificial Sequence
  Synthetic construct
cagcatcctctttcccagtg

SEQ ID NO: 2953 - DNA, 19 bp, Artificial Sequence
  Synthetic construct
ataagggcggtgcggcact

SEQ ID NO: 2954 - DNA, 22 bp, Artificial Sequence
  Synthetic construct
tgggtggaagagctgtcggtat

SEQ ID NO: 2955 - DNA, 19 bp, Artificial Sequence
  Synthetic construct
accgcccggactcaccatg

SEQ ID NO: 2956 - DNA, 21 bp, Artificial Sequence
  Synthetic construct
ccgatccagcactgggtcaat

SEQ ID NO: 2957 - DNA, 23 bp, Artificial Sequence
  Synthetic construct
actgagacctgtcaccccgactc

SEQ ID NO: 2958 - DNA, 22 bp, Artificial Sequence
  Synthetic construct
caatggtatagtgaccacgggc

SEQ ID NO: 2959 - DNA, 18 bp, Artificial Sequence
  Synthetic construct
agacgcaccgcccggact

SEQ ID NO: 2960 - DNA, 23 bp, Artificial Sequence
  Synthetic construct
tccagcactgggtcaatgatctc

SEQ ID NO: 2961 - DNA, 20 bp, Artificial Sequence
  Synthetic construct
caaacaccctcgacttggtt

SEQ ID NO: 2962 - DNA, 20 bp, Artificial Sequence
  Synthetic construct
tggcaatactgctggatgag

SEQ ID NO: 2963 - DNA, 25 bp, Artificial Sequence
  Synthetic construct
tgtggcatattgttctattcttgaa

SEQ ID NO: 2964 - DNA, 22 bp, Artificial Sequence
  Synthetic construct
tggggaagatgtacgagacttc

SEQ ID NO: 2965 - DNA, 22 bp, Artificial Sequence
  Synthetic construct
acagttgaggagattgtgaggg

SEQ ID NO: 2966 - DNA, 22 bp, Artificial Sequence
  Synthetic construct
caggtcgaagaagtactttgcc

SEQ ID NO: 2967 - DNA, 22 bp, Artificial Sequence
  Synthetic construct
ttcttgaatgggtgtcatcatg

SEQ ID NO: 2968 - DNA, 22 bp, Artificial Sequence
  Synthetic construct
caacatctggggaagatgtacg

SEQ ID NO: 2969 - DNA, 24 bp, Artificial Sequence
  Synthetic construct
ttgttctattcttgaatgggtgtc

SEQ ID NO: 2970 - DNA, 24 bp, Artificial Sequence
  Synthetic construct
aagaacaagttcaggtcgaagaag

SEQ ID NO: 2971 - DNA, 24 bp, Artificial Sequence
  Synthetic construct
atcatgaaacagttgaggagattg

SEQ ID NO: 2972 - DNA, 25 bp, Artificial Sequence
  Synthetic construct
ggtacttaagaacaagttcaggtcg

SEQ ID NO: 2973 - DNA, 23 bp, Artificial Sequence
  Synthetic construct
gaatgggtgtcatcatgaaacag

SEQ ID NO: 2974 - DNA, 20 bp, Artificial Sequence
  Synthetic construct
tactttgccaaacaccctcg

SEQ ID NO: 2975 - DNA, 23 bp, Artificial Sequence
  Synthetic construct
gacccattagtcctttccatctg

SEQ ID NO: 2976 - DNA, 21 bp, Artificial Sequence
  Synthetic construct
gacttggttacctgcctgtcc

SEQ ID NO: 2977 - DNA, 20 bp, Artificial Sequence
  Synthetic construct
acacttcctgtggtggagct

SEQ ID NO: 2978 - DNA, 23 bp, Artificial Sequence
  Synthetic construct
tccagacagttcttgaaggtgac

SEQ ID NO: 2979 - DNA, 24 bp, Artificial Sequence
  Synthetic construct
cagtgagaaaagacccattagtcc

SEQ ID NO: 2980 - DNA, 23 bp, Artificial Sequence
  Synthetic construct
cgaagaagtactttgccaaacac

SEQ ID NO: 2981 - DNA, 20 bp, Artificial Sequence
  Synthetic construct
tggtggagctgctatcagtg

SEQ ID NO: 2982 - DNA, 21 bp, Artificial Sequence
  Synthetic construct
accctcgacttggttacctgc

SEQ ID NO: 2983 - DNA, 20 bp, Artificial Sequence
  Synthetic construct
agtcctttccatctgggcca

SEQ ID NO: 2984 - DNA, 26 bp, Artificial Sequence
  Synthetic construct
cgagacttcacaaaggtacttaagaa

SEQ ID NO: 2985 - DNA, 23 bp, Artificial Sequence
  Synthetic construct
gctgctatcagtgagaaaagacc

SEQ ID NO: 2986 - DNA, 24 bp, Artificial Sequence
  Synthetic construct
ctttgccaaacaccctcgacttgg

SEQ ID NO: 2987 - DNA, 27 bp, Artificial Sequence
  Synthetic construct
tggtggagctgctatcagtgagaaaag

SEQ ID NO: 2988 - DNA, 27 bp, Artificial Sequence
  Synthetic construct
agaagtactttgccaaacaccctcgac

SEQ ID NO: 2989 - DNA, 27 bp, Artificial Sequence
  Synthetic construct
acttcctgtggtggagctgctatcagt

SEQ ID NO: 2990 - DNA, 27 bp, Artificial Sequence
  Synthetic construct
tcacaaaggtacttaagaacaagttca

SEQ ID NO: 2991 - DNA, 20 bp, Artificial Sequence
  Synthetic construct
tggcaatactgctggatgag

SEQ ID NO: 2992 - DNA, 27 bp, Artificial Sequence
  Synthetic construct
acaagttcaggtcgaagaagtactttg

SEQ ID NO: 2993 - DNA, 21 bp, Artificial Sequence
  Synthetic construct
tccgagtgtttggcaatactg

SEQ ID NO: 2994 - DNA, 24 bp, Artificial Sequence
  Synthetic construct
cacaaattacattacccaatggtg

SEQ ID NO: 2995 - DNA, 21 bp, Artificial Sequence
  Synthetic construct
gactctcctccgagtgtttgg

SEQ ID NO: 2996 - DNA, 24 bp, Artificial Sequence
  Synthetic construct
cccaatggtggaatattgtatacc

SEQ ID NO: 2997 - DNA, 20 bp, Artificial Sequence
  Synthetic construct
atactgctggatgagggcgt

SEQ ID NO: 2998 - DNA, 21 bp, Artificial Sequence
  Synthetic construct
gagttgtttcttttcgggtcg

SEQ ID NO: 2999 - DNA, 18 bp, Artificial Sequence
  Synthetic construct
gagggcgtgctcgtcttc

SEQ ID NO: 3000 - DNA, 25 bp, Artificial Sequence
  Synthetic construct
gcaaaaggtcacaaattacattacc

SEQ ID NO: 3001 - DNA, 23 bp, Artificial Sequence
  Synthetic construct
agtgtttggcaatactgctggat

SEQ ID NO: 3002 - DNA, 22 bp, Artificial Sequence
  Synthetic construct
ttttcgggtcgaacagcaaaag

SEQ ID NO: 3003 - DNA, 20 bp, Artificial Sequence
  Synthetic construct
ctggatgagggcgtgctcgt

SEQ ID NO: 3004 - DNA, 24 bp, Artificial Sequence
  Synthetic construct
acattacccaatggtggaatattg

SEQ ID NO: 3005 - DNA, 20 bp, Artificial Sequence
  Synthetic construct
actggggactctcctccgag

SEQ ID NO: 3006 - DNA, 20 bp, Artificial Sequence
  Synthetic construct
tcgaacagcaaaaggtcaca

SEQ ID NO: 3007 - DNA, 20 bp, Artificial Sequence
  Synthetic construct
ctggctcactggggactctc

SEQ ID NO: 3008 - DNA, 27 bp, Artificial Sequence
  Synthetic construct
tcgaacagcaaaaggtcacaaattaca

SEQ ID NO: 3009 - DNA, 27 bp, Artificial Sequence
  Synthetic construct
actctcctccgagtgtttggcaatact

SEQ ID NO: 3010 - DNA, 23 bp, Artificial Sequence
  Synthetic construct
tgtttcttttcgggtcgaacagc

SEQ ID NO: 3011 - DNA, 18 bp, Artificial Sequence
  Synthetic construct
tctgcggctggctcactg

SEQ ID NO: 3012 - DNA, 22 bp, Artificial Sequence
  Synthetic construct
ctgccagagttgtttcttttcg

SEQ ID NO: 3013 - DNA, 20 bp, Artificial Sequence
  Synthetic construct
caggatctgagctgggctct

SEQ ID NO: 3014 - DNA, 22 bp, Artificial Sequence
  Synthetic construct
tgatgtctgccagagttgtttc

SEQ ID NO: 3015 - DNA, 21 bp, Artificial Sequence
  Synthetic construct
tgacttcaggatctgagctgg

SEQ ID NO: 3016 - DNA, 21 bp, Artificial Sequence
  Synthetic construct
aattcacccaggaggtcttta

SEQ ID NO: 3017 - DNA, 25 bp, Artificial Sequence
  Synthetic construct
ctccatcacagaggttcctggaaga

SEQ ID NO: 3018 - DNA, 19 bp, Artificial Sequence
  Synthetic construct
ttggctgaggatggtgtaa

SEQ ID NO: 3019 - DNA, 20 bp, Artificial Sequence
  Synthetic construct
ttcgcaaatactgtggacaa

SEQ ID NO: 3020 - DNA, 32 bp, Artificial Sequence
  Synthetic construct
ccagctctgtctcatacttgactctaaagtca

SEQ ID NO: 3021 - DNA, 18 bp, Artificial Sequence
  Synthetic construct
cccatggatgtcgttctc

SEQ ID NO: 3022 - DNA, 21 bp, Artificial Sequence
  Synthetic construct
gctgctgagaatgagtttgtg

SEQ ID NO: 3023 - DNA, 25 bp, Artificial Sequence
  Synthetic construct
taggcagcatccacatccttcttca

SEQ ID NO: 3024 - DNA, 21 bp, Artificial Sequence
  Synthetic construct
ggtcctgaggaagttgatctc

SEQ ID NO: 3025 - DNA, 21 bp, Artificial Sequence
  Synthetic construct
tgtgcaccaacatctacaaga

SEQ ID NO: 3026 - DNA, 22 bp, Artificial Sequence
  Synthetic construct
cgtgaaacctgtacgcctgcag

SEQ ID NO: 3027 - DNA, 18 bp, Artificial Sequence
  Synthetic construct
aggccgtgtcagagatga

SEQ ID NO: 3028 - DNA, 19 bp, Artificial Sequence
  Synthetic construct
tcttgaccttgaacgcaaa

SEQ ID NO: 3029 - DNA, 25 bp, Artificial Sequence
  Synthetic construct
cctggatttcctcttcgtggagttt

SEQ ID NO: 3030 - DNA, 20 bp, Artificial Sequence
  Synthetic construct
catgctgttcctgaatctga

SEQ ID NO: 3031 - DNA, 20 bp, Artificial Sequence
  Synthetic construct
tccacagcactggtcttgag

SEQ ID NO: 3032 - DNA, 20 bp, Artificial Sequence
  Synthetic construct
gatcacctcgttctcaggga

SEQ ID NO: 3033 - DNA, 20 bp, Artificial Sequence
  Synthetic construct
gcgcctgaagttcttgtttc

SEQ ID NO: 3034 - DNA, 20 bp, Artificial Sequence
  Synthetic construct
gcctttggatccactaccaa

SEQ ID NO: 3035 - DNA, 20 bp, Artificial Sequence
  Synthetic construct
ccatgcaacgatctctcaaa

SEQ ID NO: 3036 - DNA, 20 bp, Artificial Sequence
  Synthetic construct
cagcagaaactttgatggca

SEQ ID NO: 3037 - DNA, 20 bp, Artificial Sequence
  Synthetic construct
acctggaggagaccacatga

SEQ ID NO: 3038 - DNA, 20 bp, Artificial Sequence
  Synthetic construct
taccatcatccagccttggt

SEQ ID NO: 3039 - DNA, 20 bp, Artificial Sequence
  Synthetic construct
gcgaagtgccaacacctaag

SEQ ID NO: 3040 - DNA, 20 bp, Artificial Sequence
  Synthetic construct
gagatgccctcctcttcctc

SEQ ID NO: 3041 - DNA, 20 bp, Artificial Sequence
  Synthetic construct
atacagcgaagctccagcac

SEQ ID NO: 3042 - DNA, 20 bp, Artificial Sequence
  Synthetic construct
agggtcgaatgcttctctga

SEQ ID NO: 3043 - DNA, 20 bp, Artificial Sequence
  Synthetic construct
ctcatccagcagtattgcca

SEQ ID NO: 3044 - DNA, 20 bp, Artificial Sequence
  Synthetic construct
ctggtccttcagctgctcat

SEQ ID NO: 3045 - DNA, 21 bp, Artificial Sequence
  Synthetic construct
tcacccagtccttacaactcc

SEQ ID NO: 3046 - DNA, 20 bp, Artificial Sequence
  Synthetic construct
catcaacgtcacccttcctc

SEQ ID NO: 3047 - DNA, 20 bp, Artificial Sequence
  Synthetic construct
caatgacgatgccagtcaac

SEQ ID NO: 3048 - DNA, 20 bp, Artificial Sequence
  Synthetic construct
aaccctctgccggttactct

SEQ ID NO: 3049 - DNA, 18 bp, Artificial Sequence
  Synthetic construct
tccggagggtctgatgaa

SEQ ID NO: 3050 - DNA, 20 bp, Artificial Sequence
  Synthetic construct
gtgaaccagggtagccagaa

SEQ ID NO: 3051 - DNA, 20 bp, Artificial Sequence
  Synthetic construct
cattgccagcattgttttct

SEQ ID NO: 3052 - DNA, 23 bp, Artificial Sequence
  Synthetic construct
tgtatattttcaactgcccttgt

SEQ ID NO: 3053 - DNA, 24 bp, Artificial Sequence
  Synthetic construct
gtgaaggtcggagtcaacggattt

SEQ ID NO: 3054 - DNA, 24 bp, Artificial Sequence
  Synthetic construct
tgccatgggtggaatcatattgga

SEQ ID NO: 3055 - DNA, 19 bp, Artificial Sequence
  Synthetic construct
tgaggtgtgcaccatgaac

SEQ ID NO: 3056 - DNA, 20 bp, Artificial Sequence
  Synthetic construct
cagaatgtgcttgccatagg

SEQ ID NO: 3057 - DNA, 22 bp, Artificial Sequence
  Synthetic construct
gggatttgcattcagagatcag

SEQ ID NO: 3058 - DNA, 18 bp, Artificial Sequence
  Synthetic construct
ggaagggcatctcgtaag

SEQ ID NO: 3059 - DNA, 20 bp, Artificial Sequence
  Synthetic construct
ggttcacccaccagagtgat

SEQ ID NO: 3060 - DNA, 18 bp, Artificial Sequence
  Synthetic construct
aggacctcccaccctcct

SEQ ID NO: 3061 - DNA, 228 bp, Artificial Sequence
  Synthetic construct
  misc_feature 21, 126, 127, 128, 129: n = A,T,C or G
ggttcacccaccagagtgatntgtggagttatggtgtgactgtgtgggagctgatgacttttggggccaaaccttacgatgggatcccagcccgggagatccctgacctgctggaaaagggggagnnnntgccccagccccccatatgcaccattgatgtctacatgatcatggtcaaatgtgcgtggctgagctgtgctggctgcctggaggagggtgggaggtcct

SEQ ID NO: 3062 - DNA, 23 bp, Artificial Sequence
  Synthetic construct
cttgtagggctcactgaagagag

SEQ ID NO: 3063 - DNA, 24 bp, Artificial Sequence
  Synthetic construct
ttaaacgtgccatcatcctgttga

SEQ ID NO: 3064 - DNA, 27 bp, Artificial Sequence
  Synthetic construct
gagtaactagaattaaacgtgccatca

SEQ ID NO: 3065 - DNA, 26 bp, Artificial Sequence
  Synthetic construct
ctttctcgttctttcctccgtaatgc

SEQ ID NO: 3066 - DNA, 25 bp, Artificial Sequence
  Synthetic construct
tgcatttctatctggttcatagaca

1. A method for diagnosis or prognosis of a cancer in a subject by detecting a signature of splicing events comprising the steps of:
a) obtaining a nucleic acid sample from said subject, and
b) determining whether the nucleic acid sample from step a) contains a signature specific to cancer.

2. The method of claim 1, wherein said cancer is selected from the group consisting of breast, glioma, large intestinal cancer, lung cancer, small cell lung cancer, stomach cancer, liver cancer, blood cancer, bone cancer, pancreatic cancer, skin cancer, head or neck cancer, cutaneous or intraocular melanoma, uterine sarcoma, ovarian cancer, rectal or colorectal cancer, anal cancer, colon cancer, fallopian tube carcinoma, endometrial carcinoma, cervical cancer, vulval cancer, squamous cell carcinoma, vaginal carcinoma, Hodgkin's disease, non-Hodgkin's lymphoma, esophageal cancer, small intestine cancer, endocrine cancer, thyroid cancer, parathyroid cancer, adrenal cancer, soft tissue tumor, urethral cancer, penile cancer, prostate cancer, chronic or acute leukemia, lymphocytic lymphoma, bladder cancer, kidney cancer, ureter cancer, renal cell carcinoma, renal pelvic carcinoma, CNS tumor, glioma, astrocytoma, glioblastoma multiforme, primary CNS lymphoma, bone marrow tumor, brain stem nerve gliomas, pituitary adenoma, uveal melanoma, testicular cancer, oral cancer, pharyngeal cancer, pediatric neoplasms, leukemia, neuroblastoma, retinoblastoma, glioma, rhabdomyoblastoma and sarcoma.

3. The method of claim 1, wherein said signature comprises at least 1 splicing variant.

4. The method of any one of claim 1, further comprising an initial step of designing at least two independent PCR primer pairs for each predicted exon-exon junction from a transcript map of a gene affected in cancer.

5. The method of claim 4, further comprising a step of PCR amplifying the nucleic acid sample with the PCR primer pairs to obtain amplicons.

6. The method of claim 4, further comprising the step of measuring the size and sequence of said amplicons.

7. The method of any one of claim 1, wherein said splicing variants occur in genes selected from the group consisting of AFF3, AGR3, APP, AXIN1, BMP4, BTC, C11orf17, CADM1, CCNE1, CHEK2, DNMT3B, FANCA, FANCL, FGFR1, FGFR2, FGFR4, FN1-EDA, FIN-EDB, FIN-IIICS, GATA3, GNB3, GPR137, HMGA1, HSC, KITLG, LGALS9, MCL1, NRG1, NUP98, PAXIP1, PLD1, POLI, POLM, PSAP, PTK2, PTPN13, RAD52, SHMT1, SLIT2, SRP19, STIM1, SYK, SYNE2 TOPBP1, TSSC4, TUBA4A UTRN, ADAM15, BCAS1, C11ORF4, CCL4, CTNNA1, DDR1, DRF1, DSC3, ECGF1, ECT2, FN1, F3, H63, HMGA1, HMMR, INSR, LIG3, LIG4, NOTCH3, PACE4, POLB, PTPRB, RSN, RUNX2, SHC1, TLK1 and TNFRSF5.

8. (canceled)

9. The method of any one of claim 3, wherein said splicing events are selected from the group consisting of an alternative 3′ splicing, an alternative 5′ splicing, an alternative 3′ and 5′ splicing, a cassette exon and alternative 5′ or 3′ splicing, a multiple cassette exons splicing, a mutually exclusive exons splicing, a cassette exon splicing, and alternative cassette exons splicing.

10. (canceled)

11. The method of claim 3, wherein said at least one splicing variant is SEQ ID NO:3061.

12. A method for identifying a signature specific of a cancer, said signature consisting of at least one specific splicing event or a specific combination of splicing events, said method comprising the steps of:
a) designing at least two independent PCR primer pairs for each predicted exon-exon junction from a transcript map of a gene affected in cancer;
b) reverse transcribing a template from RNA from a sample of cancer tissue and a sample from normal tissue;
c) amplifying amplicons of said gene by PCR with the PCR primer pairs using the template reverse transcribed from the cancer tissue and the normal tissue;
d) determining the size and sequence of said amplicons;
e) performing a comparative analysis of amplicons obtained from the template reverse transcribed from the cancer tissue and the normal tissue; and
f) identifying the presence of at least one alternative splicing event in the gene;
wherein the presence of said at least one alternative splicing event corresponds to the signature of the cancer.

13.-15. (canceled)

16. The method of any one of claim 12, wherein said PCR primer pairs are designed to amplify amplicons ranging from 100 to 700 base pairs.

17. (canceled)

18. The method of any one of claim 12, wherein said splicing event is selected from the group consisting of an alternative 3′ splicing, an alternative 5′ splicing, an alternative 3′ and 5′ splicing, a cassette exon and alternative 5′ or 3′ splicing, a multiple cassette exons splicing, a mutually exclusive exons splicing and a cassette exon splicing.

19. The method of claim 18, further comprising a step g) of selecting amplicons with a difference of at least 10% of points between a mean Ψs for normal and cancer tissue and with a maximum standard deviation of the Ψs for each tissue type of at most 26%.

20. The method of any one of claim 12, wherein said gene is selected from the group consisting of AFF3, AGR3, APP, AXIN1, BMP4, BTC, C11orf17, CADM1, CCNE1, CHEK2, DNMT3B, FANCA, FANCL, FGFR1, FGFR2, FGFR4, FN1-EDA, FIN-EDB, FIN-IIICS, GATA3, GNB3, GPR137, HMGA1, HSC, KITLG, LGALS9, MCL1, NRG1, NUP98, PAXIP1, PLD1, POLI, POLM, PSAP, PTK2, PTPN13, RAD52, SHMT1, SLIT2, SRP19, STIM1, SYK, SYNE2 TOPBP1, TSSC4, TUBA4A, UTRN, ADAM15, BCAS1, C11ORF4, CCL4, CTNNA1, DDR1, DRF1, DSC3, ECGF1, ECT2, FN1, F3, H63, HMGA1, HMMR, INSR, LIG3, LIG4, NOTCH3, PACE4, POLB, PTPRB, RSN, RUNX2, SHC1, TLK1 and TNFRSF5.

21. (canceled)

22. The method of any one of claim 12, wherein said splicing event involves alternative cassette exons.

23. A diagnostic kit for detecting a signature of a cancer in a patient comprising:
a) PCR primer pairs for predicted exon-exon junctions of at least one splicing variant; and
b) a set of instructions for using said primers to generate and detect a signature specific of ovarian cancer, said signature consisting of the at least one splicing variant or a specific combination of splicing variants.

24.-25. (canceled)

26. The kit of any of claim 23, wherein said at least one splicing variant occurs in a gene selected from the group consisting of AFF3, AGR3, APP, AXIN1, BMP4, BTC, C11orf17, CADM1, CCNE1, CHEK2, DNMT3B, FANCA, FANCL, FGFR1, FGFR2, FGFR4, FN1-EDA, FIN-EDB, FIN-IIICS, GATA3, GNB3, GPR137, HMGA1, HSC, KITLG, LGALS9, MCL1, NRG1, NUP98, PAXIP1, PLD1, POLI, POLM, PSAP, PTK2, PTPN13, RAD52, SHMT1, SLIT2, SRP19, STIM1, SYK, SYNE2 TOPBP1, TSSC4, TUBA4A, UTRN, ADAM15, BCAS1, C11ORF4, CCL4, CTNNA1, DDR1, DRF1, DSC3, ECGF1, ECT2, FN1, F3, H63, HMGA1, HMMR, INSR, LIG3, LIG4, NOTCH3, PACE4, POLB, PTPRB, RSN, RUNX2, SHC1, TLK1 and TNFRSF5.

27. (canceled)

28. A method for profiling cancer in a subject by detecting a signature of splicing events comprising the steps of:
a) obtaining a nucleic acid sample from said subject, and
b) determining whether the nucleic acid sample from step a) contains a signature specific to a cancer.

29. (canceled)

30. The method of claim 28, wherein said signature comprises at least 1 splicing variant.

31. The method of any one of claim 28, further comprising an initial step of designing at least two independent PCR primer pairs for each predicted exon-exon junction from a transcript map of a gene affected in ovarian cancer.

32. The method of any one of claim 28, further comprising a step of PCR amplifying the nucleic acid sample with the PCR primer pairs to obtain amplicons.

33. The method of any one of claim 28, further comprising the step of measuring the size and sequence of said amplicons.

34. The method of any one of claim 28, wherein said splicing variants occurs in genes selected from the group consisting of AFF3, AGR3, APP, AXIN1, BMP4, BTC, C11orf17, CADM1, CCNE1, CHEK2, DNMT3B, FANCA, FANCL, FGFR1, FGFR2, FGFR4, FN1-EDA, FIN-EDB, FIN-IIICS, GATA3, GNB3, GPR137, HMGA1, HSC, KITLG, LGALS9, MCL1, NRG1, NUP98, PAXIP1, PLD1, POLI, POLM, PSAP, PTK2, PTPN13, RAD52, SHMT1, SLIT2, SRP19, STIM1, SYK, SYNE2 TOPBP1, TSSC4, TUBA4A, UTRN, ADAM15, BCAS1, C11ORF4, CCL4, CTNNA1, DDR1, DRF1, DSC3, ECGF1, ECT2, FN1, F3, H63, HMGA1, HMMR, INSR, LIG3, LIG4, NOTCH3, PACE4, POLB, PTPRB, RSN, RUNX2, SHC1, TLK1 and TNFRSF5.

35. (canceled)

36. The method of any one of claim 28, wherein said splicing events are selected from the group consisting of an alternative 3′ splicing, an alternative 5′ splicing, an alternative 3′ and 5′ splicing, a cassette exon and alternative 5′ or 3′ splicing, a multiple cassette exons splicing, a mutually exclusive exons splicing and a cassette exon splicing.

37. (canceled)

38. The method of claim 30, wherein said at least one splicing variant is SEQ ID NO:3061.
